(19) United States
(12) Patent Application Publication
(10) Pub. No.: US 2005/0147999 A1
(43) Pub. Date: Jul. 7, 2005

(54) Lyme disease vaccines

(76) Inventors: Gil H. Choi, Rockville, MD (US); Alice L. Erwin, Seattle, WA (US); Mark S. Hanson, Clarksville, MD (US); Raju Lathigra, Germantown, MD (US)

Correspondence Address: HUMAN GENOME SCIENCES INC;INTELLECTUAL PROPERTY DEPT., 14200 SHADY GROVE ROAD, ROCKVILLE, MD, 20850, US

(21) Appl. No.: 10/994,726

(22) Filed: Nov. 23, 2004

Related U.S. Application Data
(62) Division of application No. 09/830,230, filed on Sep. 27, 2001.
(60) Provisional application No. 60/053,377, filed on Jul. 22, 1997.
(60) Provisional application No. 60/050,359, filed on Jun. 20, 1997.
(60) Provisional application No. 60/053,344, filed on Jul. 22, 1997.
(60) Provisional application No. 60/057,483, filed on Sep. 3, 1997.

(51) Int. Cl. C12Q 1/68; G01N 33/554; G01N 33/569; C07H 21/04; C07K 14/195; C07K 16/12; C12N 15/74

(52) U.S. Cl. 435/6; 435/69.3; 435/252.3; 435/320.1; 530/350; 530/388.4; 536/23.7; 435/7.32

(57) ABSTRACT

The present invention relates to novel vaccines for the prevention or attenuation of Lyme disease. The invention further relates to isolated nucleic acid molecules encoding antigenic polypeptides of Borrelia burgdorferi. Antigenic polypeptides are also provided, as are vectors, host cells and recombinant methods for producing the same. The invention additionally relates to diagnostic methods for detecting Borrelia gene expression.

### CROSS REFERENCE TO RELATED APPLICATIONS

[0001] This application is a divisional of U.S. application Ser. No. 09/830,230, filed Sep. 27, 2001, which is the national stage of International Application No. PCT/US98/12718, filed Jun. 18, 1998, which claims benefit of U.S. Provisional Application No. 60/057,483, filed Sep. 3, 1997, 60/053,344, filed Jul. 22, 1997, 60/053,377, filed Jul. 22, 1997, and 60/050,359, filed Jun. 20, 1997. U.S. Provisional Application No. 60/057,483 is incorporated by reference herein in its entirety.

### REFERENCE TO SEQUENCE LISTING ON COMPACT DISC

[0002] This application refers to a “Sequence Listing” listed below, which is provided as an electronic document on two identical compact discs (CD-R), labeled “Copy 1” and “Copy 2.” These compact discs each contain the file “PB481D1.ST25.txt” (1,364,231 bytes, created on Nov. 23, 2004), which is incorporated by reference in its entirety.

### FIELD OF THE INVENTION

[0003] The present invention relates to novel vaccines for the prevention or attenuation of Lyme disease. The invention further relates to isolated nucleic acid molecules encoding antigenic polypeptides of Borrelia burgdorferi. Antigenic polypeptides are also provided, as are vectors, host cells and recombinant methods for producing the same. The invention additionally relates to diagnostic methods for detecting Borrelia gene expression.

### BACKGROUND OF THE INVENTION

[0004] Lyme disease (Steere, A. C., Proc. Natl. Acad. Sci. USA 91: 2378-2383 (1991)), or Lyme borreliosis, is presently the most common human disease in the United States transmitted by an arthropod vector (Center for Disease Control, Morbid. Mortal. Weekly Rep. 46(23): 531-535 (1997)). Further, infection of house-hold pets, such as dogs, is a considerable problem.

[0005] While initial symptoms often include a rash at the infection point, Lyme disease is a multisystemic disorder that may include arthritic, carditic, and neurological manifestations. While antibiotics are currently used to treat active cases of Lyme disease, B. burgdorferi persists even after prolonged antibiotic treatment. Further, B. burgdorferi can persist for years in a mammalian host in the presence of an active immune response (Straubinger, R. et al., J. Clin. Microbiol. 35: 111-116 (1997); Steere, A., N. Engl. J. Med. 321: 586-596 (1989)).

[0006] Lyme disease is caused by the related tick-borne spirochetes classified as Borrelia burgdorferi sensu lato (including B. burgdorferi sensu stricto, B. afzelii, B. garinii). Although substantial progress has been made in the biochemical, ultrastructural, and genetic characterization of the organism, the spirochetal factors responsible for infectivity, immune evasion and disease pathogenesis remain largely obscure.

[0007] A number of antigenic B. burgdorferi cell surface proteins have been identified. These include the outer membrane surface proteins (Osp) OspA, OspB, OspC and OspD. OspA and OspB are encoded by tightly linked tandem genes which are transcribed as a single transcriptional unit (Brusca, J. et al., J. Bacteriol. 173: 8004-8008 (1991)). The most-studied B. burgdorferi membrane protein is OspA, a lipoprotein antigen expressed by borreliae in resting ticks and the most abundant protein expressed in vitro by most borrelial isolates (Barbour, A. G., et al., Infection & Immunity 41: 795-804 (1983); Howe, T. R., et al., Science 227: 645 (1985)).

[0008] A number of different types of Lyme disease vaccines have been shown to induce immunological responses. Whole-cell B. burgdorferi vaccines, for example, have been shown to induce both immunological responses and protective immunity in several animal models (Reviewed in Wormser, G., Clin. Infect. Dis. 21: 1267-1274 (1995)). Further, passive immunity has been demonstrated in both humans and other animals using B. burgdorferi specific antisera.

[0009] While whole-cell Lyme disease vaccines confer protective immunity in animal models, use of such vaccines presents the risk that responsive antibodies will produce an autoimmune response (Reviewed in Wormser, G., supra). This problem is at least partly the result of the production of B. burgdorferi specific antibodies which cross-react with hepatocytes and both muscle and nerve cells. B. burgdorferi heat shock proteins and the 41-kd flagellin subunit are believed to contain antigens which elicit production of these cross-reactive antibodies.

[0010] Single protein subunit vaccines for Lyme disease have also been tested. The cell surface proteins of B. burgdorferi are potential candidates for use in such vaccines and several have been shown to elicit protective immune responses in mammals (Probert, W. et al., Vaccine 15: 15-19 (1997); Fikrig, E. et al., Infect. Immun. 63: 1658-1662 (1995); Langerman S. et al., Nature 372: 552-556 (1994); Fikrig, E. et al., J. Immunol. 148: 2256-2260 (1992)). Experimental OspA vaccines, for example, have demonstrated efficacy in several animal models (Fikrig, E., et al., Proc. Natl. Acad. Sci. USA 89: 5418-5421 (1992); Johnson, B. J., et al., Vaccine 13: 1086-1094 (1996); Fikrig, E., et al., Infect. Immun. 60: 657-661 (1992); Chang, Y. F., et al., Infection & Immunity 63: 3543-3549 (1995)), and OspA vaccines for human use are under clinical evaluation (Keller, D., et al., J. Am. Med. Assoc. 271: 1764-1768 (1994); Van Hoecke, C., et al., Vaccine 14: 1620-1626 (1996)). Passive immunity is also conferred by antisera containing antibodies specific for the full-length OspA protein. Further, vaccination with plasmid DNA encoding OspA has been demonstrated to elicit protective immune responses in mice (Luke, C. et al., J. Infect. Dis. 175: 91-97 (1997); Zhong, W. et al., Eur. J. Immunol. 26: 2749-2757 (1996)).

[0011] Recent immunofluorescence assay observations indicate that during tick engorgement the expression of OspA by borreliae diminishes (deSilva, A. M., et al., J. Exp. Med. 183: 271-275 (1996)) while expression of other proteins, exemplified by OspC, increases (Schwan, T. G., et al., Proc. Natl. Acad. Sci. USA 92: 2909-2913 (1985)). By the time of transmission to hosts, spirochetes in the tick salivary glands express little or no OspA. This down-modulation of OspA appears to explain the difficulties in demonstrating immune responses to this antigen early in infection following tick bites (Kalish, R. A., et al., Infect. Immun. 63: 2228-2235 (1995); Gern, L., et al., J. Infect. Dis. 167: 971-975 (1993); Schiable, U. E., et al., Immunol. Lett. 36: 219-226 (1993)) or following challenge with limiting doses of cultured borreliae (Schiable, U. E., et al., Immunol. Lett. 36: 219-226 (1993); Barthold, S. W. and Bockenstedt, L. K., Infect. Immun. 61: 4696-4702 (1993)).

[0012] Furthermore, OspA-specific antibodies are ineffective if administered after a borrelial challenge delivered by syringe (Schiable, U. E., et al., Proc. Natl. Acad. Sci. USA 87: 3768-3772 (1990)) or tick bite (deSilva, A. M., et al., J. Exp. Med. 183: 271-275 (1996)). To be efficacious, OspA vaccines must elicit protective levels of antibody which are maintained throughout periods of tick exposure in order to block borrelia transmission from the arthropod vector.

[0013] Vaccines in current use against other pathogens include in vivo-expressed antigens which could boost anamnestic responses upon infection, potentiate the action of immune effector cells and complement, and inhibit key virulence mechanisms. OspC is both expressed during infection (Montgomery, R. R., et al., J. Exp. Med. 183: 261-269 (1996)) and a target for protective immunity (Gilmore, R. D., et al., Infect. Immun. 64: 2234-2239 (1996); Probert, W. S. and LeFebvre, R. B., Infect. Immun. 62: 1920-1926 (1994); Preac-Mursic, V., et al., Infection 20: 342-349 (1992)), but mice immunized with this protein were only protected against challenge with the homologous borrelial isolate (Probert, W. S., et al., J. Infect. Dis. 175: 400-405 (1997)). Identification of in vivo-expressed, and broadly protective, antigens of B. burgdorferi has remained elusive.

### SUMMARY OF THE INVENTION

[0014] The present invention provides isolated nucleic acid molecules comprising polynucleotides encoding the B. burgdorferi peptides having the amino acid sequences shown in Table 1. Thus, one aspect of the invention provides isolated nucleic acid molecules comprising polynucleotides having a nucleotide sequence selected from the group consisting of: (a) a nucleotide sequence encoding any of the amino acid sequences of the full-length polypeptides shown in Table 1; (b) a nucleotide sequence encoding any of the amino acid sequences of the full-length polypeptides shown in Table 1 but minus the N-terminal methionine residue, if present; (c) a nucleotide sequence encoding any of the amino acid sequences of the truncated polypeptides shown in Table 1; and (d) a nucleotide sequence complementary to any of the nucleotide sequences in (a), (b), or (c) above.

[0015] Further embodiments of the invention include isolated nucleic acid molecules that comprise a polynucleotide having a nucleotide sequence at least 90% identical, and more preferably at least 95%, 96%, 97%, 98% or 99% identical, to any of the nucleotide sequences in (a), (b), (c), or (d) above, or a polynucleotide which hybridizes under stringent hybridization conditions to a polynucleotide in (a), (b), (c), or (d) above. This polynucleotide which hybridizes does not hybridize under stringent hybridization conditions to a polynucleotide having a nucleotide sequence consisting of only A residues or of only T residues. Additional nucleic acid embodiments of the invention relate to isolated nucleic acid molecules comprising polynucleotides which encode the amino acid sequences of epitope-bearing portions of a B. burgdorferi polypeptide having an amino acid sequence in (a), (b), or (c) above.

[0016] The present invention also relates to recombinant vectors, which include the isolated nucleic acid molecules of the present invention, and to host cells containing the recombinant vectors, as well as to methods of making such vectors and host cells and for using these vectors for the production of B. burgdorferi polypeptides or peptides by recombinant techniques.

[0017] The invention further provides isolated B. burgdorferi polypeptides having an amino acid sequence selected from the group consisting of: (a) an amino acid sequence of any of the full-length polypeptides shown in Table 1; (b) an amino acid sequence of any of the full-length polypeptides shown in Table 1 but minus the N-terminal methionine residue, if present; (c) an amino acid sequence of any of the truncated polypeptides shown in Table 1; and (d) an amino acid sequence of an epitope-bearing portion of any one of the polypeptides of (a), (b), or (c).

[0018] The polypeptides of the present invention also include polypeptides having an amino acid sequence with at least 70% similarity, and more preferably at least 75%, 80%, 85%, 90%, 95%, 96%, 97%, 98%, or 99% similarity to those described in (a), (b), (c), or (d) above, as well as polypeptides having an amino acid sequence at least 70% identical, more preferably at least 75% identical, and still more preferably 80%, 85%, 90%, 95%, 96%, 97%, 98%, or 99% identical to those above; as well as isolated nucleic acid molecules encoding such polypeptides.

[0019] The present invention further provides a vaccine, preferably a multi-component vaccine comprising one or more of the B. burgdorferi polypeptides shown in Table 1, or fragments thereof, together with a pharmaceutically acceptable diluent, carrier, or excipient, wherein the B. burgdorferi polypeptide(s) are present in an amount effective to elicit an immune response to members of the Borrelia genus in an animal. The B. burgdorferi polypeptides of the present invention may further be combined with one or more immunogens of one or more other borrelial or non-borrelial organisms to produce a multi-component vaccine intended to elicit an immunological response against members of the Borrelia genus and, optionally, one or more non-borrelial organisms.

[0020] The vaccines of the present invention can be administered in a DNA form, e.g., “naked” DNA, wherein the DNA encodes one or more borrelial polypeptides and, optionally, one or more polypeptides of a non-borrelial organism. The DNA encoding one or more polypeptides may be constructed such that these polypeptides are expressed fusion proteins.

[0021] The vaccines of the present invention may also be administered as a component of a genetically engineered organism. Thus, a genetically engineered organism which expresses one or more B. burgdorferi polypeptides may be administered to an animal. For example, such a genetically engineered organism may contain one or more B. burgdorferi polypeptides of the present invention intracellularly, on its cell surface, or in its periplasmic space. Further, such a genetically engineered organism may secrete one or more B. burgdorferi polypeptides.

[0022] The vaccines of the present invention may be co-administered to an animal with an immune system modulator (e.g., CD86 and GM-CSF).

[0023] The invention also provides a method of inducing an immunological response in an animal to one or more members of the Borrelia genus, e.g., B. burgdorferi sensu stricto, B. afzelii, and B. garinii, comprising administering to the animal a vaccine as described above.

[0024] The invention further provides a method of inducing a protective immune response in an animal, sufficient to prevent or attenuate an infection by members of the Borrelia genus, comprising administering to the animal a composition comprising one or more of the polypeptides shown in Table 1, or fragments thereof. Further, these polypeptides, or fragments thereof, may be conjugated to another immunogen and/or administered in admixture with an adjuvant.

[0025] The invention further relates to antibodies elicited in an animal by the administration of one or more B. burgdorferi polypeptides of the present invention.

[0026] The invention also provides diagnostic methods for detecting the expression of genes of members of the Borrelia genus in an animal. One such method involves assaying for the expression of a gene encoding Borrelia peptides in a sample from an animal. This expression may be assayed either directly (e.g., by assaying polypeptide levels using antibodies elicited in response to amino acid sequences shown in Table 1) or indirectly (e.g., by assaying for antibodies having specificity for amino acid sequences shown in Table 1). An example of such a method involves the use of the polymerase chain reaction (PCR) to amplify and detect Borrelia nucleic acid sequences.

[0027] The present invention also relates to nucleic acid probes having all or part of a nucleotide sequence shown in Table 1 which are capable of hybridizing under stringent conditions to Borrelia nucleic acids. The invention further relates to a method of detecting one or more Borrelia nucleic acids in a biological sample obtained from an animal, said one or more nucleic acids encoding Borrelia polypeptides, comprising:
[0028] a) contacting the sample with one or more of the above-described nucleic acid probes, under conditions such that hybridization occurs, and
[0029] b) detecting hybridization of said one or more probes to the Borrelia nucleic acid present in the biological sample.

### DETAILED DESCRIPTION

[0030] The present invention relates to recombinant antigenic B. burgdorferi polypeptides and fragments thereof. The invention also relates to methods for using these polypeptides to produce immunological responses and to confer immunological protection to disease caused by members of the genus Borrelia. The invention further relates to nucleic acid sequences which encode antigenic B. burgdorferi polypeptides and to methods for detecting Borrelia nucleic acids and polypeptides in biological samples. The invention also relates to Borrelia specific antibodies and methods for detecting such antibodies produced in a host animal.

Definitions

[0031] The following definitions are provided to clarify the subject matter which the inventors consider to be the present invention.

[0032] As used herein, the phrase “pathogenic agent” means an agent which causes a disease state or affliction in an animal. Included within this definition, for examples, are bacteria, protozoans, fungi, viruses and metazoan parasites which either produce a disease state or render an animal infected with such an organism susceptible to a disease state (e.g., a secondary infection). Further included are species and strains of the genus Borrelia which produce disease states in animals.

[0033] As used herein, the term “organism” means any living biological system, including viruses, regardless of whether it is a pathogenic agent.

[0034] As used herein, the term “Borrelia” means any species or strain of bacteria which is members of the genus Borrelia. Included within this definition are Borrelia burgdorferi sensu lato (including B. burgdorferi sensu stricto, B. afzelii, B. garinii), B. andersonii, B. anserina, B. japonica, B. coriaceae, and other members of the genus Borrelia regardless of whether they are known pathogenic agents.

[0035] As used herein, the phrase “one or more B. burgdorferi polypeptides of the present invention” means the amino acid sequence of one or more of the B. burgdorferi polypeptides disclosed in Table 1. These polypeptides may be expressed as fusion proteins wherein the B. burgdorferi polypeptides of the present invention are linked to additional amino acid sequences which may be of borrelial or non-borrelial origin. This phrase further includes fragments of the B. burgdorferi polypeptides of the present invention.

[0036] As used herein, the phrase “full-length amino acid sequence” and “full-length polypeptide” refer to an amino acid sequence or polypeptide encoded by a full-length open reading frame (ORF). An ORF may be defined as a nucleotide sequence bounded by stop codons which encodes a putative polypeptide. An ORF may also be defined as a nucleotide sequence within a stop codon bounded sequence which contains an initiation codon (e.g., a methionine or valine codon) on the 5′ end and a stop codon on the 3′ end.

[0037] As used herein, the phrase “truncated amino acid sequence” and “truncated polypeptide” refer to a sub-sequence of a full-length amino acid sequence or polypeptide. Several criteria may also be used to define the truncated amino acid sequence or polypeptide. For example, a truncated polypeptide may be defined as a mature polypeptide (e.g., a polypeptide which lacks a leader sequence). A truncated polypeptide may also be defined as an amino acid sequence which is a portion of a longer sequence that has been selected for ease of expression in a heterologous system but retains regions which render the polypeptide useful for use in vaccines (e.g., antigenic regions which are expected to elicit a protective immune response).

[0038] Additional definitions are provided throughout the specification.

Explanation of Table 1

[0039] Table 1 lists B. burgdorferi nucleotide and amino acid sequences of the present invention. The nomenclature used therein is as follows:

[0040] “nt” refers to nucleotide sequences;
[0041] “aa” refers to amino acid sequences;
[0042] “f” refers to full-length nucleotide or amino acid sequences; and
[0043] “t” refers to truncated nucleotide or amino acid sequences.

[0044] Thus, for example, the designation “f101.aa” refers to the full-length amino acid sequence of B. burgdorferi polypeptide number 101. Further, “f101.nt” refers to the full-length nucleotide sequence encoding the full-length amino acid sequence of B. burgdorferi polypeptide number 101.

Explanation of Table 2

[0045] Table 2 lists accession numbers for the closest matching sequences between the polypeptides of the present invention and those available through GenBank and GeneSeq databases. These reference numbers are the database entry numbers commonly used by those of skill in the art, who will be familiar with their denominations. The descriptions of the nomenclature for GenBank are available from the National Center for Biotechnology Information. Column 1 lists the gene or ORF of the present invention. Column 2 lists the accession number of a “match” gene sequence in GenBank or GeneSeq databases. Column 3 lists the description of the “match” gene sequence. Columns 4 and 5 are the high score and smallest sum probability, respectively, calculated by BLAST. Polypeptides of the present invention that do not share significant identity/similarity with any polypeptide sequences of GenBank and GeneSeq are not represented in Table 2. Polypeptides of the present invention that share significant identity/similarity with more than one of the polypeptides of GenBank and GeneSeq are represented more than once.

Explanation of Table 3.

[0046] The B. burgdorferi polypeptides of the present invention may include one or more conservative amino acid substitutions from natural mutations or human manipulation as indicated in Table 3. Changes are preferably of a minor nature, such as conservative amino acid substitutions that do not significantly affect the folding or activity of the protein. Residues from the following groups, as indicated in Table 3, may be substituted for one another: Aromatic, Hydrophobic, Polar, Basic, Acidic, and Small,

Explanation of Table 4

[0047] Table 4 lists residues comprising antigenic epitopes of antigenic epitope-bearing fragments present in each of the full length B. burgdorferi polypeptides described in Table 1 as predicted by the inventors using the algorithm of Jameson and Wolf, (1988) Comp. Appl. Biosci. 4: 181-186. The Jameson-Wolf antigenic analysis was performed using the computer program PROTEAN (Version 3.11 for the Power MacIntosh, DNASTAR, Inc., 1228 South Park Street Madison, Wis.). B. burgdorferi polypeptide shown in Table 1 may one or more antigenic epitopes comprising residues described in Table 4. It will be appreciated that depending on the analytical criteria used to predict antigenic determinants, the exact address of the determinant may vary slightly. The residues and locations shown described in Table 4 correspond to the amino acid sequences for each full length gene sequence shown in Table 1 and in the Sequence Listing. Polypeptides of the present invention that do not have antigenic epitopes recognized by the Jameson-Wolf algorithm are not represented in Table 2.

Selection of Nucleic Acid Sequences Encoding Antigenic B. burgdorferi Polypeptides

[0048] The present invention provides a select number of ORFs from those presented in the fragments of the Borrelia burgdorferi genome which may prove useful for the generation of a protective immune response. The sequenced B. burgdorferi genomic DNA was obtained from a sub-cultured isolate of ATCC Deposit No. 35210. The sub-cultured isolate was deposited on Aug. 8, 1997 at the American Type Culture Collection, 12301 Park Lawn Drive, Rockville, Md. 20852, and given accession number 202012.

[0049] Some ORFs contained in the subset of fragments of the B. burgdorferi genome disclosed herein were derived through the use of a number of screening criteria detailed below. The ORFs are generally bounded at the amino terminus by a methionine residue and at the carboxy terminus by a stop codon.

[0050] Many of the selected sequences do not consist of complete ORFs. Although a polypeptide representing a complete ORF may be the closest approximation of a protein native to an organism, it is not always preferred to express a complete ORF in a heterologous system. It may be challenging to express and purify a highly hydrophobic protein by common laboratory methods. Some of the polypeptide vaccine candidates described herein have been modified slightly to simplify the production of recombinant protein. For example, nucleotide sequences which encode highly hydrophobic domains, such as those found at the amino terminal signal sequence, have been excluded from some constructs used for in vitro expression of the polypeptides. Furthermore, any highly hydrophobic amino acid sequences occurring at the carboxy terminus have also been excluded from the recombinant expression constructs. Thus, in one embodiment, a polypeptide which represents a truncated or modified ORF may be used as an antigen.

[0051] While numerous methods are known in the art for selecting potentially immunogenic polypeptides, many of the ORFs disclosed herein were selected on the basis of screening all theoretical Borrelia burgdorferi ORFs for several aspects of potential immunogenicity. One set of selection criteria are as follows:

[0052] 1. Type I signal sequence: An amino terminal type I signal sequence generally directs a nascent protein across the plasma and outer membranes to the exterior of the bacterial cell. Experimental evidence obtained from studies with Escherichia coli suggests that the typical type I signal sequence consists of the following biochemical and physical attributes (Izard, J. W. and Kendall, D. A. Mol. Microbiol. 13: 765-773 (1994)). The length of the type I signal sequence is approximately 15 to 25 primarily hydrophobic amino acid residues with a net positive charge in the extreme amino terminus. In addition, the central region of the signal sequence adopts an alpha-helical conformation in a hydrophobic environment. Finally, the region surrounding the actual site of cleavage is ideally six residues long, with small side-chain amino acids in the −1 and −3 positions.

[0053] 2. Type IV signal sequence: The type IV signal sequence is an example of the several types of functional signal sequences which exist in addition to the type I signal sequence detailed above. Although functionally related, the type IV signal sequence possesses a unique set of biochemical and physical attributes (Strom, M. S. and Lory, S., J. Bacteriol. 174: 7345-7351 (1992)). These are typically six to eight amino acids with a net basic charge followed by an additional sixteen to thirty primarily hydrophobic residues. The cleavage site of a type IV signal sequence is typically after the initial six to eight amino acids at the extreme amino terminus. In addition, type IV signal sequences generally contain a phenylalanine residue at the +1 site relative to the cleavage site.

[0054] 3. Lipoprotein: Studies of the cleavage sites of twenty-six bacterial lipoprotein precursors has allowed the definition of a consensus amino acid sequence for lipoprotein cleavage. Nearly three-fourths of the bacterial lipoprotein precursors examined contained the sequence L-(A,S)-(G,A)-C at positions −3 to +1, relative to the point of cleavage (Hayashi, S. and Wu, H. C., J. Bioenerg. Biomembr. 22: 451-471 (1990)).

[0055] 4. LPXTG motif: It has been experimentally determined that most anchored proteins found on the surface of gram-positive bacteria possess a highly conserved carboxy terminal sequence. More than fifty such proteins from organisms such as S. pyogenes, S. mutans, B. burgdorferi, S. pneumoniae, and others, have been identified based on their extracellular location and carboxy terminal amino acid sequence (Fischetti, V. A., ASM News 62: 405-410 (1996)). The conserved region consists of six charged amino acids at the extreme carboxy terminus coupled to 15-20 hydrophobic amino acids presumed to function as a transmembrane domain. Immediately adjacent to the transmembrane domain is a six amino acid sequence conserved in nearly all proteins examined. The amino acid sequence of this region is L-P-X-T-G-X, where X is any amino acid.

[0056] An algorithm for selecting antigenic and immunogenic Borrelia burgdorferi polypeptides including the foregoing criteria was developed. The algorithm is similar to that described in U.S. patent application Ser. No. 08/781,986, filed Jan. 3, 1997, which is fully incorporated by reference herein. Use of the algorithm by the inventors to select immunologically useful Borrelia burgdorferi polypeptides resulted in the selection of a number of the disclosed ORFs. Polypeptides comprising the polypeptides identified in this group may be produced by techniques standard in the art and as further described herein.

Nucleic Acid Molecules

[0057] The present invention provides isolated nucleic acid molecules comprising polynucleotides encoding the B. burgdorferi polypeptides having the amino acid sequences shown in Table 1, which were determined by sequencing the genome of B. burgdorferi deposited as ATCC deposit no. 202012 and selected as putative immunogens.

[0058] Unless otherwise indicated, all nucleotide sequences determined by sequencing a DNA molecule herein were determined using an automated DNA sequencer (such as the Model 373 from Applied Biosystems, Inc.), and all amino acid sequences of polypeptides encoded by DNA molecules determined herein were predicted by translation of DNA sequences determined as above. Therefore, as is known in the art for any DNA sequence determined by this automated approach, any nucleotide sequence determined herein may contain some errors. Nucleotide sequences determined by automation are typically at least about 90% identical, more typically at least about 95% to at least about 99.9% identical to the actual nucleotide sequence of the sequenced DNA molecule. The actual sequence can be more precisely determined by other approaches including manual DNA sequencing methods well known in the art. As is also known in the art, a single insertion or deletion in a determined nucleotide sequence compared to the actual sequence will cause a frame shift in translation of the nucleotide sequence such that the predicted amino acid sequence encoded by a determined nucleotide sequence will be completely different from the amino acid sequence actually encoded by the sequenced DNA molecule, beginning at the point of such an insertion or deletion.

[0059] Unless otherwise indicated, each “nucleotide sequence” set forth herein is presented as a sequence of deoxyribonucleotides (abbreviated A, G, C and T). However, by “nucleotide sequence” of a nucleic acid molecule or polynucleotide is intended, for a DNA molecule or polynucleotide, a sequence of deoxyribonucleotides, and for an RNA molecule or polynucleotide, the corresponding sequence of ribonucleotides (A, G, C and U), where each thymidine deoxyribonucleotide (T) in the specified deoxyribonucleotide sequence is replaced by the ribonucleotide uridine (U). For instance, reference to an RNA molecule having a sequence of Table 1 set forth using deoxyribonucleotide abbreviations is intended to indicate an RNA molecule having a sequence in which each deoxyribonucleotide A, G or C of Table 1 has been replaced by the corresponding ribonucleotide A, G or C, and each deoxyribonucleotide T has been replaced by a ribonucleotide U.

[0060] Nucleic acid molecules of the present invention may be in the form of RNA, such as mRNA, or in the form of DNA, including, for instance, cDNA and genomic DNA obtained by cloning or produced synthetically. The DNA may be double-stranded or single-stranded. Single-stranded DNA or RNA may be the coding strand, also known as the sense strand, or it may be the non-coding strand, also referred to as the anti-sense strand.

[0061] By “isolated” nucleic acid molecule(s) is intended a nucleic acid molecule, DNA or RNA, which has been removed from its native environment. For example, recombinant DNA molecules contained in a vector are considered isolated for the purposes of the present invention. Further examples of isolated DNA molecules include recombinant DNA molecules maintained in heterologous host cells or purified (partially or substantially) DNA molecules in solution. Isolated RNA molecules include in vivo or in vitro RNA transcripts of the DNA molecules of the present invention. Isolated nucleic acid molecules according to the present invention further include such molecules produced synthetically.

[0062] In addition, isolated nucleic acid molecules of the invention include DNA molecules which comprise a sequence substantially different from those described above but which, due to the degeneracy of the genetic code, still encode a B. burgdorferi polypeptides and peptides of the present invention (e.g. polypeptides of Table 1). That is, all possible DNA sequences that encode the B. burgdorferi polypeptides of the present invention. This includes the genetic code and species-specific codon preferences known in the art. Thus, it would be routine for one skilled in the art to generate the degenerate variants described above, for instance, to optimize codon expression for a particular host (e.g., change codons in the bacteria mRNA to those preferred by a mammalian or other bacterial host such as E. coli).

[0063] The invention further provides isolated nucleic acid molecules having the nucleotide sequence shown in Table 1 or a nucleic acid molecule having a sequence complementary to one of the above sequences. Such isolated molecules, particularly DNA molecules, are useful as probes for gene mapping and for identifying B. burgdorferi in a biological sample, for instance, by PCR, Southern blot, Northern blot, or other form of hybridization analysis.

[0064] The present invention is further directed to nucleic acid molecules encoding portions or fragments of the nucleotide sequences described herein. Fragments include portions of the nucleotide sequences of Table 1 at least 10 contiguous nucleotides in length selected from any two integers, one of which representing a 5′ nucleotide position and a second of which representing a 3′ nucleotide position, where the first nucleotide for each nucleotide sequence in Table 1 is position 1. That is, every combination of a 5′ and 3′ nucleotide position that a fragment at least 10 contiguous nucleotides in length could occupy is included in the invention. “At least” means a fragment may be 10 contiguous nucleotide bases in length or any integer between 10 and the length of an entire nucleotide sequence of Table 1 minus 1. Therefore, included in the invention are contiguous fragments specified by any 5′ and 3′ nucleotide base positions of a nucleotide sequences of Table 1 wherein the contiguous fragment is any integer between 10 and the length of an entire nucleotide sequence minus 1.

[0065] Further, the invention includes polynucleotides comprising fragments specified by size, in nucleotides, rather than by nucleotide positions. The invention includes any fragment size, in contiguous nucleotides, selected from integers between 10 and the length of an entire nucleotide sequence minus 1. Preferred sizes of contiguous nucleotide fragments include 20 nucleotides, 30 nucleotides, 40 nucleotides, 50 nucleotides. Other preferred sizes of contiguous nucleotide fragments, which may be useful as diagnostic probes and primers, include fragments 50-300 nucleotides in length which include, as discussed above, fragment sizes representing each integer between 50-300. Larger fragments are also useful according to the present invention corresponding to most, if not all, of the nucleotide sequences shown in Table 1 or of the B. burgdorferi nucleotide sequences of the plasmid clones listed in Table 1. The preferred sizes are, of course, meant to exemplify not limit the present invention as all size fragments, representing any integer between 10 and the length of an entire nucleotide sequence minus 1, are included in the invention. Additional preferred nucleic acid fragments of the present invention include nucleic acid molecules encoding epitope-bearing portions of B. burgdorferi polypeptides identified in Table 4.

[0066] The present invention also provides for the exclusion of any fragment, specified by 5′ and 3′ base positions or by size in nucleotide bases as described above for any nucleotide sequence of Table 1 or the plasmid clones listed in Table 1. Any number of fragments of nucleotide sequences in Table 1 or the plasmid clones listed in Table 1, specified by 5′ and 3′ base positions or by size in nucleotides, as described above, may be excluded from the present invention.

[0067] Preferred nucleic acid fragments of the present invention also include nucleic acid molecules encoding epitope-bearing portions of the B. burgdorferi polypeptides shown in Table 1. Such nucleic acid fragments of the present invention include, for example, nucleic acid molecules encoding polypeptide fragments comprising from about the amino terminal residue to about the carboxy terminal residue of each fragment shown in Table 4. The above referred to polypeptide fragments are antigenic regions of particular B. burgdorferi polypeptides shown in Table 1. Methods for determining other such epitope-bearing portions for the remaining polypeptides described in Table 1 are well known in the art and are described in detail below.

[0068] In another aspect, the invention provides isolated nucleic acid molecules comprising polynucleotides which hybridize under stringent hybridization conditions to a portion of a polynucleotide in a nucleic acid molecule of the invention described above, for instance, a nucleic acid sequence shown in Table 1. By “stringent hybridization conditions” is intended overnight incubation at 42 C in a solution comprising: 50% formamide, 5×SSC (150 mM NaCl, 15 mM trisodium citrate), 0.50 mM sodium phosphate (pH 7.6), 5× Denhardt's solution, 10% dextran sulfate, and 20 g/ml denatured, sheared salmon sperm DNA, followed by washing the filters in 0.1×SSC at about 65 C.

[0069] By polynucleotides which hybridize to a “portion” of a polynucleotide is intended polynucleotides (either DNA or RNA) which hybridize to at least about 15 nucleotides (nt), and more preferably at least about 20 nt, still more preferably at least about 30 nt, and even more preferably about 30-70 nt of the reference polynucleotide. These are useful as diagnostic probes and primers as discussed above and in more detail below.

[0070] Of course, polynucleotides hybridizing to a larger portion of the reference polynucleotide, for instance, a portion 50-100 nt in length, or even to the entire length of the reference polynucleotide, are also useful as probes according to the present invention, as are polynucleotides corresponding to most, if not all, of a nucleotide sequence as shown in Table 1. By a portion of a polynucleotide of “at least 20 nt in length,” for example, is intended 20 or more contiguous nucleotides from the nucleotide sequence of the reference polynucleotide (e.g., a nucleotide sequences as shown in Table 1). As noted above, such portions are useful diagnostically either as probes according to conventional DNA hybridization techniques or as primers for amplification of a target sequence by PCR, as described, for instance, in Molecular Cloning, A Laboratory Manual, 2nd. edition, Sambrook, J., Fritsch, E. F. and Maniatis, T., eds., Cold Spring Harbor Laboratory Press, Cold Spring Harbor, N.Y. (1989), the entire disclosure of which is hereby incorporated herein by reference.

[0071] Since nucleic acid sequences encoding the B. burgdorferi polypeptides of the present invention are provided in Table 1, generating polynucleotides which hybridize to portions of these sequences would be routine to the skilled artisan. For example, the hybridizing polynucleotides of the present invention could be generated synthetically according to known techniques.

[0072] As indicated, nucleic acid molecules of the present invention which encode B. burgdorferi polypeptides of the present invention may include, but are not limited to those encoding the amino acid sequences of the polypeptides by themselves; and additional coding sequences which code for additional amino acids, such as those which provide additional functionalities. Thus, the sequences encoding these polypeptides may be fused to a marker sequence, such as a sequence encoding a peptide which facilitates purification of the fused polypeptide. In certain preferred embodiments of this aspect of the invention, the marker amino acid sequence is a hexa-histidine peptide, such as the tag provided in a pQE vector (Qiagen, Inc.), among others, many of which are commercially available. As described in Gentz et al., Proc. Natl. Acad. Sci. USA 86: 821-824 (1989), for instance, hexa-histidine provides for convenient purification of the resulting fusion protein.

[0073] Thus, the present invention also includes genetic fusions wherein the B. burgdorferi nucleic acid sequences coding sequences provided in Table 1 are linked to additional nucleic acid sequences to produce fusion proteins. These fusion proteins may include epitopes of borrelial or non-borrelial origin designed to produce proteins having enhanced immunogenicity. Further, the fusion proteins of the present invention may contain antigenic determinants known to provide helper T-cell stimulation, peptides encoding sites for post-translational modifications which enhance immunogenicity (e.g., acylation), peptides which facilitate purification (e.g., histidine “tag”), or amino acid sequences which target the fusion protein to a desired location (e.g., a heterologous leader sequence). For instance, hexa-histidine provides for convenient purification of the fusion protein. See Gentz et al. (1989) Proc. Natl. Acad. Sci. 86: 821-24. The “HA” tag is another peptide useful for purification which corresponds to an epitope derived from the influenza hemagglutinin protein. See Wilson et al. (1984) Cell 37: 767. As discussed below, other such fusion proteins include the B. burgdorferi polypeptides of the present invention fused to Fc at the N- or C-terminus.

[0074] Post-translational modification of the full-length B. burgdorferi OspA protein expressed in E. coli is believed to increase the immunogenicity of this protein. Erdile, L. et al., Infect. Immun. 61: 81-90 (1993). B. burgdorferi OspA when expressed in E. coli, for example, is post-translationally modified in at least two ways. First, a signal peptide is cleaved; second, lipid moieties are attached. The presence of these lipid moieties is believed to confer enhanced immunogenicity and results in the elicitation of a strong protective immunological response.

Variant and Mutant Polynucleotides

[0075] The present invention thus includes nucleic acid molecules and sequences which encode fusion proteins comprising one or more B. burgdorferi polypeptides of the present invention fused to an amino acid sequence which allows for post-translational modification to enhance immunogenicity. This post-translational modification may occur either in vitro or when the fusion protein is expressed in vivo in a host cell. An example of such a modification is the introduction of an amino acid sequence which results in the attachment of a lipid moiety. Such a lipid moiety attachment site of OspA, which is lipidated upon expression in E. coli, has been identified. Bouchon, B. et al., Anal. Biochem. 246: 52-61 (1997).

[0076] Thus, as indicated above, the present invention includes genetic fusions wherein a B. burgdorferi nucleic acid sequence provided in Table 1 is linked to a nucleotide sequence encoding another amino acid sequence. These other amino acid sequences may be of borrelial origin (e.g., another sequence selected from Table 1) or non-borrelial origin. An example of such a fusion protein is reported in Fikrig, E. et al., Science 250: 553-556 (1990) where an OspA-glutathione-5-transferase fusion protein was produced and shown to elicit protective immunity against Lyme disease in immune competent mice.

[0077] The present invention further relates to variants of the nucleic acid molecules of the present invention, which encode portions, analogs or derivatives of the B. burgdorferi polypeptides shown in Table 1. Variants may occur naturally, such as a natural allelic variant. By an “allelic variant” is intended one of several alternate forms of a gene occupying a given locus on a chromosome of an organism. Genes II, Lewin, B., ed., John Wiley & Sons, New York (1985). Non-naturally occurring variants may be produced using art-known mutagenesis techniques.

[0078] Such variants include those produced by nucleotide substitutions, deletions or additions. The substitutions, deletions or additions may involve one or more nucleotides. These variants may be altered in coding regions, non-coding regions, or both. Alterations in the coding regions may produce conservative or non-conservative amino acid substitutions, deletions or additions. Especially preferred among these are silent substitutions, additions and deletions, which do not alter the properties and activities of the B. burgdorferi polypeptides disclosed herein or portions thereof. Also especially preferred in this regard are conservative substitutions.

[0079] The present application is further directed to nucleic acid molecules at least 90%, 95%, 96%, 97%, 98% or 99% identical to a nucleic acid sequence shown in Table 1. The above nucleic acid sequences are included irrespective of whether they encode a polypeptide having B. burgdorferi activity. This is because even where a particular nucleic acid molecule does not encode a polypeptide having B. burgdorferi activity, one of skill in the art would still know how to use the nucleic acid molecule, for instance, as a hybridization probe. Uses of the nucleic acid molecules of the present invention that do not encode a polypeptide having B. burgdorferi activity include, inter alia, isolating an B. burgdorferi gene or allelic variants thereof from a DNA library, and detecting B. burgdorferi mRNA expression samples, environmental samples, suspected of containing B. burgdorferi by Northern Blot analysis.

[0080] Embodiments of the invention include isolated nucleic acid molecules comprising a polynucleotide having a nucleotide sequence at least 90% identical, and more preferably at least 95%, 96%, 97%, 98% or 99% identical to (a) a nucleotide sequence encoding any of the amino acid sequences of the full-length polypeptides shown in Table 1; (b) a nucleotide sequence encoding any of the amino acid sequences of the full-length polypeptides shown in Table 1 but minus the N-terminal methionine residue, if present; (c) a nucleotide sequence encoding any of the amino acid sequences of the truncated polypeptides shown in Table 1; and (d) a nucleotide sequence complementary to any of the nucleotide sequences in (a), (b), or (c) above.

[0081] Preferred, are nucleic acid molecules having sequences at least 90%, 95%, 96%, 97%, 98% or 99% identical to the nucleic acid sequence shown in Table 1, which do, in fact, encode a polypeptide having B. burgdorferi protein activity By “a polypeptide having B. burgdorferi activity” is intended polypeptides exhibiting activity similar, but not necessarily identical, to an activity of the B. burgdorferi protein of the invention, as measured in a particular biological assay suitable for measuring activity of the specified protein.

[0082] Due to the degeneracy of the genetic code, one of ordinary skill in the art will immediately recognize that a large number of the nucleic acid molecules having a sequence at least 90%, 95%, 96%, 97%, 98%, or 99% identical to the nucleic acid sequences shown in Table 1 will encode a polypeptide having B. burgdorferi protein activity. In fact, since degenerate variants of these nucleotide sequences all encode the same polypeptide, this will be clear to the skilled artisan even without performing the above described comparison assay. It will be further recognized in the art that, for such nucleic acid molecules that are not degenerate variants, a reasonable number will also encode a polypeptide having B. burgdorferi protein activity. This is because the skilled artisan is fully aware of amino acid substitutions that are either less likely or not likely to significantly effect protein function (e.g., replacing one aliphatic amino acid with a second aliphatic amino acid), as further described below.

[0083] The biological activity or function of the polypeptides of the present invention are expected to be similar or identical to polypeptides from other bacteria that share a high degree of structural identity/similarity. Tables 2 lists accession numbers and descriptions for the closest matching sequences of polypeptides available through GenBank and Derwent databases. It is therefore expected that the biological activity or function of the polypeptides of the present invention will be similar or identical to those polypeptides from other bacterial genuses, species, or strains listed in Table 2.

[0084] By a polynucleotide having a nucleotide sequence at least, for example, 95% “identical” to a reference nucleotide sequence of the present invention, it is intended that the nucleotide sequence of the polynucleotide is identical to the reference sequence except that the polynucleotide sequence may include up to five point mutations per each 100 nucleotides of the reference nucleotide sequence encoding the B. burgdorferi polypeptide. In other words, to obtain a polynucleotide having a nucleotide sequence at least 95% identical to a reference nucleotide sequence, up to 5% (5 of 100) of the nucleotides in the reference sequence may be deleted, inserted, or substituted with another nucleotide. The query sequence may be an entire sequence shown in Table 1, the ORF (open reading frame), or any fragment specified as described herein.

[0085] As a practical matter, whether any particular nucleic acid molecule or polypeptide is at least 90%, 95%, 96%, 97%, 98% or 99% identical to a nucleotide sequence of the presence invention can be determined conventionally using known computer programs. A preferred method for determining the best overall match between a query sequence (a sequence of the present invention) and a subject sequence, also referred to as a global sequence alignment, can be determined using the FASTDB computer program based on the algorithm of Brutlag et al. See Brutlag et al. (1990) Comp. App. Biosci. 6: 237-245. In a sequence alignment the query and subject sequences are both DNA sequences. An RNA sequence can be compared by first converting U's to T's. The result of said global sequence alignment is in percent identity. Preferred parameters used in a FASTDB alignment of DNA sequences to calculate percent identity are: Matrix=Unitary, k-tuple=4, Mismatch Penalty=1, Joining Penalty=30, Randomization Group Length=0, Cutoff Score=1, Gap Penalty=5, Gap Size Penalty 0.05, Window Size=500 or the length of the subject nucleotide sequence, whichever is shorter.

[0086] If the subject sequence is shorter than the query sequence because of 5′ or 3′ deletions, not because of internal deletions, a manual correction must be made to the results. This is because the FASTDB program does not account for 5′ and 3′ truncations of the subject sequence when calculating percent identity. For subject sequences truncated at the 5′ or 3′ ends, relative to the query sequence, the percent identity is corrected by calculating the number of bases of the query sequence that are 5′ and 3′ of the subject sequence, which are not matched/aligned, as a percent of the total bases of the query sequence. Whether a nucleotide is matched/aligned is determined by results of the FASTDB sequence alignment. This percentage is then subtracted from the percent identity, calculated by the above FASTDB program using the specified parameters, to arrive at a final percent identity score. This corrected score is what is used for the purposes of the present invention. Only nucleotides outside the 5′ and 3′ nucleotides of the subject sequence, as displayed by the FASTDB alignment, which are not matched/aligned with the query sequence, are calculated for the purposes of manually adjusting the percent identity score.

[0087] For example, a 90 nucleotide subject sequence is aligned to a 100 nucleotide query sequence to determine percent identity. The deletions occur at the 5′ end of the subject sequence and therefore, the FASTDB alignment does not show a matched/alignment of the first 10 nucleotides at 5′ end. The 10 unpaired nucleotides represent 10% of the sequence (number of nucleotides at the 5′ and 3′ ends not matched/total number of nucleotides in the query sequence) so 10% is subtracted from the percent identity score calculated by the FASTDB program. If the remaining 90 nucleotides were perfectly matched the final percent identity would be 90%. In another example, a 90 nucleotide subject sequence is compared with a 100 nucleotide query sequence. This time the deletions are internal deletions so that there are no nucleotides on the 5′ or 3′ of the subject sequence which are not matched/aligned with the query. In this case the percent identity calculated by FASTDB is not manually corrected. Once again, only nucleotides 5′ and 3′ of the subject sequence which are not matched/aligned with the query sequence are manually corrected for. No other manual corrections are to made for the purposes of the present invention.

Vectors and Host Cells

[0088] The present invention also relates to vectors which include the isolated DNA molecules of the present invention, host cells which are genetically engineered with the recombinant vectors, and the production of B. burgdorferi polypeptides or fragments thereof by recombinant techniques.

[0089] Recombinant constructs may be introduced into host cells using well known techniques such as infection, transduction, transfection, transvection, electroporation and transformation. The vector may be, for example, a phage, plasmid, viral or retroviral vector. Retroviral vectors may be replication competent or replication defective. In the latter case, viral propagation generally will occur only in complementing host cells.

[0090] The polynucleotides may be joined to a vector containing a selectable marker for propagation in a host. Generally, a plasmid vector is introduced in a precipitate, such as a calcium phosphate precipitate, or in a complex with a charged lipid. If the vector is a virus, it may be packaged in vitro using an appropriate packaging cell line and then transduced into host cells.

[0091] Preferred are vectors comprising cis-acting control regions to the polynucleotide of interest. Appropriate trans-acting factors may be supplied by the host, supplied by a complementing vector or supplied by the vector itself upon introduction into the host.

[0092] In certain preferred embodiments in this regard, the vectors provide for specific expression, which may be inducible and/or cell type-specific. Particularly preferred among such vectors are those inducible by environmental factors that are easy to manipulate, such as temperature and nutrient additives.

[0093] Expression vectors useful in the present invention include chromosomal-, episomal- and virus-derived vectors, e.g., vectors derived from bacterial plasmids, bacteriophage, yeast episomes, yeast chromosomal elements, viruses such as baculoviruses, papova viruses, vaccinia viruses, adenoviruses, fowl pox viruses, pseudorabies viruses and retroviruses, and vectors derived from combinations thereof, such as cosmids and phagemids.

[0094] The DNA insert should be operatively linked to an appropriate promoter, such as the phage lambda PL promoter, the E. coli lac, trp and tac promoters, the SV40 early and late promoters and promoters of retroviral LTRs, to name a few. Other suitable promoters will be known to the skilled artisan. The expression constructs will further contain sites for transcription initiation, termination and, in the transcribed region, a ribosome binding site for translation. The coding portion of the mature transcripts expressed by the constructs will preferably include a translation initiating site at the beginning and a termination codon (UAA, UGA or UAG) appropriately positioned at the end of the polypeptide to be translated.

[0095] As indicated, the expression vectors will preferably include at least one selectable marker. Such markers include dihydrofolate reductase or neomycin resistance for eukaryotic cell culture and tetracycline or ampicillin resistance genes for culturing in E. coli and other bacteria. Representative examples of appropriate hosts include, but are not limited to, bacterial cells, such as E. coli, Streptomyces and Salmonella typhimurium cells; fungal cells, such as yeast cells; insect cells such as Drosophila S2 and Spodoptera Sf9 cells; animal cells such as CHO, COS and Bowes melanoma cells; and plant cells. Appropriate culture mediums and conditions for the above-described host cells are known in the art.

[0096] Among vectors preferred for use in bacteria include pQE70, pQE60 and pQE-9, available from Qiagen; pBS vectors, Phagescript vectors, Bluescript vectors, pNH8A, pNH16a, pNH18A, pNH46A available from Stratagene; pET series of vectors available from Novagen; and ptrc99a, pKK223-3, pKK233-3, pDR540, pRIT5 available from Pharmacia. Among preferred eukaryotic vectors are pWLNEO, pSV2CAT, pOG44, pXT1 and pSG available from Stratagene; and pSVK3, pBPV, pMSG and pSVL available from Pharmacia. Other suitable vectors will be readily apparent to the skilled artisan.

[0097] Among known bacterial promoters suitable for use in the present invention include the E. coli lacI and lacZ promoters, the T3 and T7 promoters, the gpt promoter, the lambda PR and PL promoters and the trp promoter. Suitable eukaryotic promoters include the CMV immediate early promoter, the HSV thymidine kinase promoter, the early and late SV40 promoters, the promoters of retroviral LTRs, such as those of the Rous sarcoma virus (RSV), and metallothionein promoters, such as the mouse metallothionein-I promoter.

[0098] Introduction of the construct into the host cell can be effected by calcium phosphate transfection, DEAE-dextran mediated transfection, cationic lipid-mediated transfection, electroporation, transduction, infection or other methods. Such methods are described in many standard laboratory manuals, such as Davis et al., Basic Methods In Molecular Biology (1986).

[0099] Transcription of DNA encoding the polypeptides of the present invention by higher eukaryotes may be increased by inserting an enhancer sequence into the vector. Enhancers are cis-acting elements of DNA, usually about from 10 to 300 bp that act to increase transcriptional activity of a promoter in a given host cell-type. Examples of enhancers include the SV40 enhancer, which is located on the late side of the replication origin at bp 100 to 270, the cytomegalovirus early promoter enhancer, the polyoma enhancer on the late side of the replication origin, and adenovirus enhancers.

[0100] For secretion of the translated polypeptide into the lumen of the endoplasmic reticulum, into the periplasmic space or into the extracellular environment, appropriate secretion signals may be incorporated into the expressed polypeptide. The signals may be endogenous to the polypeptide or they may be heterologous signals.

[0101] The polypeptide may be expressed in a modified form, such as a fusion protein, and may include not only secretion signals, but also additional heterologous functional regions. For instance, a region of additional amino acids, particularly charged amino acids, may be added to the N-terminus of the polypeptide to improve stability and persistence in the host cell, during purification, or during subsequent handling and storage. Also, peptide moieties may be added to the polypeptide to facilitate purification. Such regions may be removed prior to final preparation of the polypeptide. The addition of peptide moieties to polypeptides to engender secretion or excretion, to improve stability and to facilitate purification, among others, are familiar and routine techniques in the art. A preferred fusion protein comprises a heterologous region from immunoglobulin that is useful to solubilize proteins. For example, EP-A-O 464 533 (Canadian counterpart 2045869) discloses fusion proteins comprising various portions of constant region of immunoglobin molecules together with another human protein or part thereof. In many cases, the Fc part in a fusion protein is thoroughly advantageous for use in therapy and diagnosis and thus results, for example, in improved pharmacokinetic properties (EP-A 0232 262). On the other hand, for some uses it would be desirable to be able to delete the Fc part after the fusion protein has been expressed, detected and purified in the advantageous manner described. This is the case when Fc portion proves to be a hindrance to use in therapy and diagnosis, for example when the fusion protein is to be used as antigen for immunizations. In drug discovery, for example, human proteins, such as, hIL5-receptor has been fused with Fc portions for the purpose of high-throughput screening assays to identify antagonists of hIL-5. See Bennett, D. et al., J. Molec. Recogn. 8: 52-58 (1995) and Johanson, K. et al., J. Biol. Chem. 270 (16): 9459-9471 (1995).

[0102] The B. burgdorferi polypeptides can be recovered and purified from recombinant cell cultures by well-known methods including ammonium sulfate or ethanol precipitation, acid extraction, anion or cation exchange chromatography, phosphocellulose chromatography, hydrophobic interaction chromatography, affinity chromatography, hydroxylapatite chromatography, lectin chromatography and high performance liquid chromatography (“HPLC”) is employed for purification. Polypeptides of the present invention include naturally purified products, products of chemical synthetic procedures, and products produced by recombinant techniques from a prokaryotic or eukaryotic host, including, for example, bacterial, yeast, higher plant, insect and mammalian cells.

Polypeptides and Fragments

[0103] The invention further provides isolated polypeptides having the amino acid sequences in Table 1, and peptides or polypeptides comprising portions of the above polypeptides. The terms “peptide” and “oligopeptide” are considered synonymous (as is commonly recognized) and each term can be used interchangeably as the context requires to indicate a chain of at least to amino acids coupled by peptidyl linkages. The word “polypeptide” is used herein for chains containing more than ten amino acid residues. All oligopeptide and polypeptide formulas or sequences herein are written from left to right and in the direction from amino terminus to carboxy terminus.

[0104] As discussed in detail below, immunization using B. burgdorferi sensu stricto isolate B31 decorin-binding protein elicits the production of antiserum which confers passive immunity against Borrelia species and strains which express divergent forms of this protein. Cassatt, D. et al., Protection of Borrelia burgdorferi Infection by Antibodies to Decorin-binding Protein, in VACCINES97, Cold Spring Harbor Press (1997), pages 191-195. Thus, some amino acid sequences of the B. burgdorferi polypeptides shown in Table 1 can be varied without significantly effecting the antigenicity of the polypeptides. If such differences in sequence are contemplated, it should be remembered that there will be critical areas on the polypeptide which determine antigenicity. In general, it is possible to replace residues which do not form part of an antigenic epitope without significantly effecting the antigenicity of a polypeptide.

Variant and Mutant Polypeptides

[0105] To improve or alter the characteristics of B. burgdorferi polypeptides of the present invention, protein engineering may be employed. Recombinant DNA technology known to those skilled in the art can be used to create novel mutant proteins or muteins including single or multiple amino acid substitutions, deletions, additions, or fusion proteins. Such modified polypeptides can show, e.g., enhanced activity or increased stability. In addition, they may be purified in higher yields and show better solubility than the corresponding natural polypeptide, at least under certain purification and storage conditions.

N-Terminal and C-Terminal Deletion Mutants

[0106] It is known in the art that one or more amino acids may be deleted from the N-terminus or C-terminus without substantial loss of biological function. For instance, Ron et al. J. Biol. Chem., 268: 2984-2988 (1993), reported modified KGF proteins that had heparin binding activity even if 3, 8, or 27 N-terminal amino acid residues were missing. Accordingly, the present invention provides polypeptides having one or more residues deleted from the amino terminus of the amino acid sequence of the B. burgdorferi polypeptides shown in Table 1, and polynucleotides encoding such polypeptides.

[0107] Similarly, many examples of biologically functional C-terminal deletion muteins are known. For instance, Interferon gamma shows up to ten times higher activities by deleting 8-10 amino acid residues from the carboxy terminus of the protein See, e.g., Dobeli, et al. (1988) J. Biotechnology 7: 199-216. Accordingly, the present invention provides polypeptides having one or more residues from the carboxy terminus of the amino acid sequence of the B. burgdorferi polypeptides shown in Table 1. The invention also provides polypeptides having one or more amino acids deleted from both the amino and the carboxyl termini as described below.

[0108] The present invention is further directed to polynucleotide encoding portions or fragments of the amino acid sequences described herein as well as to portions or fragments of the isolated amino acid sequences described herein. Fragments include portions of the amino acid sequences of Table 1, are at least 5 contiguous amino acid in length, are selected from any two integers, one of which representing a N-terminal position. The initiation codon of the polypeptides of the present inventions position 1. Every combination of a N-terminal and C-terminal position that a fragment at least 5 contiguous amino acid residues in length could occupy, on any given amino acid sequence of Table 1 is included in the invention. At least means a fragment may be 5 contiguous amino acid residues in length or any integer between 5 and the number of residues in a full length amino acid sequence minus 1. Therefore, included in the invention are contiguous fragments specified by any N-terminal and C-terminal positions of amino acid sequence set forth in Table 1 wherein the contiguous fragment is any integer between 5 and the number of residues in a full length sequence minus 1.

[0109] Further, the invention includes polypeptides comprising fragments specified by size, in amino acid residues, rather than by N-terminal and C-terminal positions. The invention includes any fragment size, in contiguous amino acid residues, selected from integers between 5 and the number of residues in a full length sequence minus 1. Preferred sizes of contiguous polypeptide fragments include about 5 amino acid residues, about 10 amino acid residues, about 20 amino acid residues, about 30 amino acid residues, about 40 amino acid residues, about 50 amino acid residues, about 100 amino acid residues, about 200 amino acid residues, about 300 amino acid residues, and about 400 amino acid residues. The preferred sizes are, of course, meant to exemplify, not limit, the present invention as all size fragments representing any integer between 5 and the number of residues in a full length sequence minus 1 are included in the invention. The present invention also provides for the exclusion of any fragments specified by N-terminal and C-terminal positions or by size in amino acid residues as described above. Any number of fragments specified by N-terminal and C-terminal positions or by size in amino acid residues as described above may be excluded.

[0110] The above fragments need not be active since they would be useful, for example, in immunoassays, in epitope mapping, epitope tagging, to generate antibodies to a particular portion of the protein, as vaccines, and as molecular weight markers.

Other Mutants

[0111] In addition to N- and C-terminal deletion forms of the protein discussed above, it also will be recognized by one of ordinary skill in the art that some amino acid sequences of the B. burgdorferi polypeptide can be varied without significant effect of the structure or function of the protein. If such differences in sequence are contemplated, it should be remembered that there will be critical areas on the protein which determine activity.

[0112] Thus, the invention further includes variations of the B. burgdorferi polypeptides which show substantial B. burgdorferi polypeptide activity or which include regions of B. burgdorferi protein such as the protein portions discussed below. Such mutants include deletions, insertions, inversions, repeats, and type substitutions selected according to general rules known in the art so as to have little effect on activity. For example, guidance concerning how to make phenotypically silent amino acid substitutions is provided. There are two main approaches for studying the tolerance of an amino acid sequence to change. See, Bowie, J. U. et al. (1990), Science 247: 1306-1310. The first method relies on the process of evolution, in which mutations are either accepted or rejected by natural selection. The second approach uses genetic engineering to introduce amino acid changes at specific positions of a cloned gene and selections or screens to identify sequences that maintain functionality.

[0113] These studies have revealed that proteins are surprisingly tolerant of amino acid substitutions. The studies indicate which amino acid changes are likely to be permissive at a certain position of the protein. For example, most buried amino acid residues require nonpolar side chains, whereas few features of surface side chains are generally conserved. Other such phenotypically silent substitutions are described by Bowie et al. (supra) and the references cited therein. Typically seen as conservative substitutions are the replacements, one for another, among the aliphatic amino acids Ala, Val, Leu and Ile; interchange of the hydroxyl residues Ser and Thr, exchange of the acidic residues Asp and Glu, substitution between the amide residues Asn and Gln, exchange of the basic residues Lys and Arg and replacements among the aromatic residues Phe, Tyr.

[0114] Thus, the fragment, derivative, analog, or homolog of the polypeptide of Table 1, or that encoded by the plasmids listed in Table 1, may be: (i) one in which one or more of the amino acid residues are substituted with a conserved or non-conserved amino acid residue (preferably a conserved amino acid residue) and such substituted amino acid residue may or may not be one encoded by the genetic code: or (ii) one in which one or more of the amino acid residues includes a substituent group: or (iii) one in which the B. burgdorferi polypeptide is fused with another compound, such as a compound to increase the half-life of the polypeptide (for example, polyethylene glycol): or (iv) one in which the additional amino acids are fused to the above form of the polypeptide, such as an IgG Fc fusion region peptide or leader or secretory sequence or a sequence which is employed for purification of the above form of the polypeptide or a proprotein sequence. Such fragments, derivatives and analogs are deemed to be within the scope of those skilled in the art from the teachings herein.

[0115] Thus, the B. burgdorferi polypeptides of the present invention may include one or more amino acid substitutions, deletions, or additions, either from natural mutations or human manipulation. As indicated, changes are preferably of a minor nature, such as conservative amino acid substitutions that do not significantly affect the folding or activity of the protein (see Table 3).

[0116] Amino acids in the B. burgdorferi proteins of the present invention that are essential for function can be identified by methods known in the art, such as site-directed mutagenesis or alanine-scanning mutagenesis. See, e.g., Cunningham et al. (1989) Science 244: 1081-1085. The latter procedure introduces single alanine mutations at every residue in the molecule. The resulting mutant molecules are then tested for biological activity using assays appropriate for measuring the function of the particular protein.

[0117] Of special interest are substitutions of charged amino acids with other charged or neutral amino acids which may produce proteins with highly desirable improved characteristics, such as less aggregation. Aggregation may not only reduce activity but also be problematic when preparing pharmaceutical formulations, because aggregates can be immunogenic. See, e.g., Pinckard et al., (1967) Clin. Exp. Immunol. 2: 331-340; Robbins, et al., (1987) Diabetes 36: 838-845; Cleland, et al., (1993) Crit. Rev. Therapeutic Drug Carrier Systems 10: 307-377.

[0118] The polypeptides of the present invention are preferably provided in an isolated form, and preferably are substantially purified. A recombinantly produced version of the B. burgdorferi polypeptide can be substantially purified by the one-step method described by Smith et al. (1988) Gene 67: 31-40. Polypeptides of the invention also can be purified from natural or recombinant sources using antibodies directed against the polypeptides of the invention in methods which are well known in the art of protein purification.

[0119] The invention further provides for isolated B. burgdorferi polypeptides comprising an amino acid sequence selected from the group consisting of: (a) the amino acid sequence of a full-length B. burgdorferi polypeptide having the complete amino acid sequence shown in Table 1; (b) the amino acid sequence of a full-length B. burgdorferi polypeptide having the complete amino acid sequence shown in Table 1 excepting the N-terminal methionine; (c) the complete amino acid sequence encoded by the plasmids listed in Table 1; and (d) the complete amino acid sequence excepting the N-terminal methionine encoded by the plasmids listed in Table 1. The polypeptides of the present invention also include polypeptides having an amino acid sequence at least 80% identical, more preferably at least 90% identical, and still more preferably 95%, 96%, 97%, 98% or 99% identical to those described in (a), (b), (c), and (d) above.

[0120] Further polypeptides of the present invention include polypeptides which have at least 90% similarity, more preferably at least 95% similarity, and still more preferably at least 96%, 97%, 98% or 99% similarity to those described above.

[0121] A further embodiment of the invention relates to a polypeptide which comprises the amino acid sequence of a B. burgdorferi polypeptide having an amino acid sequence which contains at least one conservative amino acid substitution, but not more than 50 conservative amino acid substitutions, not more than 40 conservative amino acid substitutions, not more than 30 conservative amino acid substitutions, and not more than 20 conservative amino acid substitutions. Also provided are polypeptides which comprise the amino acid sequence of a B. burgdorferi polypeptide, having at least one, but not more than 10, 9, 8, 7, 6, 5, 4, 3, 2 or 1 conservative amino acid substitutions.

[0122] By a polypeptide having an amino acid sequence at least, for example, 95% “identical” to a query amino acid sequence of the present invention, it is intended that the amino acid sequence of the subject polypeptide is identical to the query sequence except that the subject polypeptide sequence may include up to five amino acid alterations per each 100 amino acids of the query amino acid sequence. In other words, to obtain a polypeptide having an amino acid sequence at least 95% identical to a query amino acid sequence, up to 5% of the amino acid residues in the subject sequence may be inserted, deleted, (indels) or substituted with another amino acid. These alterations of the reference sequence may occur at the amino or carboxy terminal positions of the reference amino acid sequence or anywhere between those terminal positions, interspersed either individually among residues in the reference sequence or in one or more contiguous groups within the reference sequence.

[0123] As a practical matter, whether any particular polypeptide is at least 90%, 95%, 96%, 97%, 98% or 99% identical to, for instance, the amino acid sequences shown in Table 1 or to the amino acid sequence encoded by the plasmids listed in Table 1 can be determined conventionally using known computer programs. A preferred method for determining the best overall match between a query sequence (a sequence of the present invention) and a subject sequence, also referred to as a global sequence alignment, can be determined using the FASTDB computer program based on the algorithm of Brutlag et al., (1990) Comp. App. Biosci. 6: 237-245. In a sequence alignment the query and subject sequences are both amino acid sequences. The result of said global sequence alignment is in percent identity. Preferred parameters used in a FASTDB amino acid alignment are: Matrix=PAM 0, k-tuple=2, Mismatch Penalty=1, Joining Penalty=20, Randomization Group Length=0, Cutoff Score=1, Window Size=sequence length, Gap Penalty=5, Gap Size Penalty=0.05, Window Size=500 or the length of the subject amino acid sequence, whichever is shorter.

[0124] If the subject sequence is shorter than the query sequence due to N- or C-terminal deletions, not because of internal deletions, the results, in percent identity, must be manually corrected. This is because the FASTDB program does not account for N- and C-terminal truncations of the subject sequence when calculating global percent identity. For subject sequences truncated at the N- and C-termini, relative to the query sequence, the percent identity is corrected by calculating the number of residues of the query sequence that are N- and C-terminal of the subject sequence, which are not matched/aligned with a corresponding subject residue, as a percent of the total bases of the query sequence. Whether a residue is matched/aligned is determined by results of the FASTDB sequence alignment. This percentage is then subtracted from the percent identity, calculated by the above FASTDB program using the specified parameters, to arrive at a final percent identity score. This final percent identity score is what is used for the purposes of the present invention. Only residues to the N- and C-termini of the subject sequence, which are not matched/aligned with the query sequence, are considered for the purposes of manually adjusting the percent identity score. That is, only query amino acid residues outside the farthest N- and C-terminal residues of the subject sequence.

[0125] For example, a 90 amino acid residue subject sequence is aligned with a 100 residue query sequence to determine percent identity. The deletion occurs at the N-terminus of the subject sequence and therefore, the FASTDB alignment does not match/align with the first 10 residues at the N-terminus. The 10 unpaired residues represent 10% of the sequence (number of residues at the N- and C-termini not matched/total number of residues in the query sequence) so 10% is subtracted from the percent identity score calculated by the FASTDB program. If the remaining 90 residues were perfectly matched the final percent identity would be 90%. In another example, a 90 residue subject sequence is compared with a 100 residue query sequence. This time the deletions are internal so there are no residues at the N- or C-termini of the subject sequence which are not matched/aligned with the query. In this case the percent identity calculated by FASTDB is not manually corrected. Once again, only residue positions outside the N- and C-terminal ends of the subject sequence, as displayed in the FASTDB alignment, which are not matched/aligned with the query sequence are manually corrected. No other manual corrections are to made for the purposes of the present invention.

[0126] The above polypeptide sequences are included irrespective of whether they have their normal biological activity. This is because even where a particular polypeptide molecule does not have biological activity, one of skill in the art would still know how to use the polypeptide, for instance, as a vaccine or to generate antibodies. Other uses of the polypeptides of the present invention that do not have B. burgdorferi activity include, inter alia, as epitope tags, in epitope mapping, and as molecular weight markers on SDS-PAGE gels or on molecular sieve gel filtration columns using methods known to those of skill in the art.

[0127] As described below, the polypeptides of the present invention can also be used to raise polyclonal and monoclonal antibodies, which are useful in assays for detecting B. burgdorferi protein expression or as agonists and antagonists capable of enhancing or inhibiting B. burgdorferi protein function. Further, such polypeptides can be used in the yeast two-hybrid system to “capture” B. burgdorferi protein binding proteins which are also candidate agonists and antagonists according to the present invention. See, e.g., Fields et al. (1989) Nature 340: 245-246.

Epitope-Bearing Portions

[0128] In another aspect, the invention provides peptides and polypeptides comprising epitope-bearing portions of the B. burgdorferi polypeptides of the present invention. These epitopes are immunogenic or antigenic epitopes of the polypeptides of the present invention. An “immunogenic epitope” is defined as a part of a protein that elicits an antibody response when the whole protein or polypeptide is the immunogen. These immunogenic epitopes are believed to be confined to a few loci on the molecule. On the other hand, a region of a protein molecule to which an antibody can bind is defined as an “antigenic determinant” or “antigenic epitope.” The number of immunogenic epitopes of a protein generally is less than the number of antigenic epitopes. See, e.g., Geysen, et al. (1983) Proc. Natl. Acad. Sci. USA 81: 3998-4002. Predicted antigenic epitopes are shown in Table 4, below. It is pointed out that Table 4 only lists amino acid residues comprising epitopes predicted to have the highest degree of antigenicity. The polypeptides not listed in Table 4 and portions of polypeptides not listed in Table 4 are not considered non-antigenic. This is because they may still be antigenic in vivo but merely not recognized as such by the particular algorithm used. Thus, Table 4 lists the amino acid residues comprising preferred antigenic epitopes but not a complete list. Amino acid residues comprising other antigenic epitopes may be determined by algorithms similar to the Jameson-Wolf analysis or by in vivo testing for an antigenic response using the methods described herein or those known in the art.

[0129] As to the selection of peptides or polypeptides bearing an antigenic epitope (i.e., that contain a region of a protein molecule to which an antibody can bind), it is well known in that art that relatively short synthetic peptides that mimic part of a protein sequence are routinely capable of eliciting an antiserum that reacts with the partially mimicked protein. See, e.g., Sutcliffe, et al., (1983) Science 219: 660-666. Peptides capable of eliciting protein-reactive sera are frequently represented in the primary sequence of a protein, can be characterized by a set of simple chemical rules, and are confined neither to immunodominant regions of intact proteins (i.e., immunogenic epitopes) nor to the amino or carboxyl terminals. Peptides that are extremely hydrophobic and those of six or fewer residues generally are ineffective at inducing antibodies that bind to the mimicked protein; longer, peptides, especially those containing proline residues, usually are effective. See, Sutcliffe, et al., supra, p. 661. For instance, 18 of 20 peptides designed according to these guidelines, containing 8-39 residues covering 75% of the sequence of the influenza virus hemagglutinin HA1 polypeptide chain, induced antibodies that reacted with the HA1 protein or intact virus; and 12/12 peptides from the MuLV polymerase and 18/18 from the rabies glycoprotein induced antibodies that precipitated the respective proteins.

[0130] Antigenic epitope-bearing peptides and polypeptides of the invention are therefore useful to raise antibodies, including monoclonal antibodies, that bind specifically to a polypeptide of the invention. Thus, a high proportion of hybridomas obtained by fusion of spleen cells from donors immunized with an antigen epitope-bearing peptide generally secrete antibody reactive with the native protein. See Sutcliffe, et al., supra, p. 663. The antibodies raised by antigenic epitope-bearing peptides or polypeptides are useful to detect the mimicked protein, and antibodies to different peptides may be used for tracking the fate of various regions of a protein precursor which undergoes post-translational processing. The peptides and anti-peptide antibodies may be used in a variety of qualitative or quantitative assays for the mimicked protein, for instance in competition assays since it has been shown that even short peptides (e.g., about 9 amino acids) can bind and displace the larger peptides in immunoprecipitation assays. See, e.g., Wilson, et al., (1984) Cell 37: 767-778. The anti-peptide antibodies of the invention also are useful for purification of the mimicked protein, for instance, by adsorption chromatography using methods known in the art.

[0131] Antigenic epitope-bearing peptides and polypeptides of the invention designed according to the above guidelines preferably contain a sequence of at least seven, more preferably at least nine and most preferably between about 10 to about 50 amino acids (i.e. any integer between 7 and 50) contained within the amino acid sequence of a polypeptide of the invention. However, peptides or polypeptides comprising a larger portion of an amino acid sequence of a polypeptide of the invention, containing about 50 to about 100 amino acids, or any length up to and including the entire amino acid sequence of a polypeptide of the invention, also are considered epitope-bearing peptides or polypeptides of the invention and also are useful for inducing antibodies that react with the mimicked protein. Preferably, the amino acid sequence of the epitope-bearing peptide is selected to provide substantial solubility in aqueous solvents (i.e., the sequence includes relatively hydrophilic residues and highly hydrophobic sequences are preferably avoided); and sequences containing proline residues are particularly preferred.

[0132] Non-limiting examples of antigenic polypeptides or peptides that can be used to generate an Borrelia-specific immune response or antibodies include portions of the amino acid sequences identified in Table 1. More specifically, Table 4 discloses a list of non-limiting residues that are involved in the antigenicity of the epitope-bearing fragments of the present invention. Therefore, the present inventions provides for isolated and purified antigenic epitope-bearing fragments of the polypeptides of the present invention comprising a peptide sequences of Table 4. The antigenic epitope-bearing fragments comprising a peptide sequence of Table 4 preferably contain a sequence of at least seven, more preferably at least nine and most preferably between about 10 to about 50 amino acids (i.e. any integer between 7 and 50) of a polypeptide of the present invention. That is, included in the present invention are antigenic polypeptides between the integers of 7 and 50 amino acid in length comprising one or more of the sequences of Table 4. Therefore, in most cases, the polypeptides of Table 4 make up only a portion of the antigenic polypeptide. All combinations of sequences between the integers of 7 and 50 amino acid in length comprising one or more of the sequences of Table 4 are included. The antigenic epitope-bearing fragments may be specified by either the number of contiguous amino acid residues or by specific N-terminal and C-terminal positions as described above for the polypeptide fragments of the present invention, wherein the initiation codon is residue 1. Any number of the described antigenic epitope-bearing fragments of the present invention may also be excluded from the present invention in the same manner.

[0133] The epitope-bearing peptides and polypeptides of the invention may be produced by any conventional means for making peptides or polypeptides including recombinant means using nucleic acid molecules of the invention. For instance, an epitope-bearing amino acid sequence of the present invention may be fused to a larger polypeptide which acts as a carrier during recombinant production and purification, as well as during immunization to produce anti-peptide antibodies. Epitope-bearing peptides also may be synthesized using known methods of chemical synthesis. For instance, Houghten has described a simple method for synthesis of large numbers of peptides, such as 10-20 mg of 248 different 13 residue peptides representing single amino acid variants of a segment of the HA1 polypeptide which were prepared and characterized (by ELISA-type binding studies) in less than four weeks (Houghten, R. A. Proc. Natl. Acad. Sci. USA 82: 5131-5135 (1985)). This “Simultaneous Multiple Peptide Synthesis (SMPS)” process is further described in U.S. Pat. No. 4,631,211 to Houghten and coworkers (1986). In this procedure the individual resins for the solid-phase synthesis of various peptides are contained in separate solvent-permeable packets, enabling the optimal use of the many identical repetitive steps involved in solid-phase methods. A completely manual procedure allows 500-1000 or more syntheses to be conducted simultaneously (Houghten et al. (1985) Proc. Natl. Acad. Sci. 82: 5131-5135 at 5134.

[0134] Epitope-bearing peptides and polypeptides of the invention are used to induce antibodies according to methods well known in the art. See, e.g., Sutcliffe, et al., supra; Wilson, et al., supra; and Bittle, et al. (1985) J. Gen. Virol. 66: 2347-2354. Generally, animals may be immunized with free peptide; however, anti-peptide antibody titer may be boosted by coupling of the peptide to a macromolecular carrier, such as keyhole limpet hemacyanin (KLH) or tetanus toxoid. For instance, peptides containing cysteine may be coupled to carrier using a linker such as m-maleimidobenzoyl-N-hydroxysuccinimide ester (MBS), while other peptides may be coupled to carrier using a more general linking agent such as glutaraldehyde. Animals such as rabbits, rats and mice are immunized with either free or carrier-coupled peptides, for instance, by intraperitoneal and/or intradermal injection of emulsions containing about 100 μg peptide or carrier protein and Freund's adjuvant. Several booster injections may be needed, for instance, at intervals of about two weeks, to provide a useful titer of anti-peptide antibody which can be detected, for example, by ELISA assay using free peptide adsorbed to a solid surface. The titer of anti-peptide antibodies in serum from an immunized animal may be increased by selection of anti-peptide antibodies, for instance, by adsorption to the peptide on a solid support and elution of the selected antibodies according to methods well known in the art.

[0135] Immunogenic epitope-bearing peptides of the invention, i.e., those parts of a protein that elicit an antibody response when the whole protein is the immunogen, are identified according to methods known in the art. For instance, Geysen, et al., supra, discloses a procedure for rapid concurrent synthesis on solid supports of hundreds of peptides of sufficient purity to react in an ELISA. Interaction of synthesized peptides with antibodies is then easily detected without removing them from the support. In this manner a peptide bearing an immunogenic epitope of a desired protein may be identified routinely by one of ordinary skill in the art. For instance, the immunologically important epitope in the coat protein of foot-and-mouth disease virus was located by Geysen et al. supra with a resolution of seven amino acids by synthesis of an overlapping set of all 208 possible hexapeptides covering the entire 213 amino acid sequence of the protein. Then, a complete replacement set of peptides in which all 20 amino acids were substituted in turn at every position within the epitope were synthesized, and the particular amino acids conferring specificity for the reaction with antibody were determined. Thus, peptide analogs of the epitope-bearing peptides of the invention can be made routinely by this method. U.S. Pat. No. 4,708,781 to Geysen (1987) further describes this method of identifying a peptide bearing an immunogenic epitope of a desired protein.

[0136] Further still, U.S. Pat. No. 5,194,392, to Geysen (1990), describes a general method of detecting or determining the sequence of monomers (amino acids or other compounds) which is a topological equivalent of the epitope (i.e., a “mimotope”) which is complementary to a particular paratope (antigen binding site) of an antibody of interest. More generally, U.S. Pat. No. 4,433,092, also to Geysen (1989), describes a method of detecting or determining a sequence of monomers which is a topographical equivalent of a ligand which is complementary to the ligand binding site of a particular receptor of interest. Similarly, U.S. Pat. No. 5,480,971 to Houghten, R. A. et al. (1996) discloses linear C₁-C₇-alkyl peralkylated oligopeptides and sets and libraries of such peptides, as well as methods for using such oligopeptide sets and libraries for determining the sequence of a peralkylated oligopeptide that preferentially binds to an acceptor molecule of interest. Thus, non-peptide analogs of the epitope-bearing peptides of the invention also can be made routinely by these methods. The entire disclosure of each document cited in this section on “Polypeptides and Fragments” is hereby incorporated herein by reference.

[0137] As one of skill in the art will appreciate, the polypeptides of the present invention and the epitope-bearing fragments thereof described above can be combined with parts of the constant domain of immunoglobulins (IgG), resulting in chimeric polypeptides. These fusion proteins facilitate purification and show an increased half-life in vivo. This has been shown, e.g., for chimeric proteins consisting of the first two domains of the human CD4-polypeptide and various domains of the constant regions of the heavy or light chains of mammalian immunoglobulins. (EPA 0,394,827; Traunecker et al. (1988) Nature 331: 84-86. Fusion proteins that have a disulfide-linked dimeric structure due to the IgG part can also be more efficient in binding and neutralizing other molecules than a monomeric B. burgdorferi polypeptide or fragment thereof alone. See Fountoulakis et al. (1995) J. Biochem. 270: 3958-3964. Nucleic acids encoding the above epitopes of B. burgdorferi polypeptides can also be recombined with a gene of interest as an epitope tag to aid in detection and purification of the expressed polypeptide.

Antibodies

[0138] B. burgdorferi protein-specific antibodies for use in the present invention can be raised against the intact B. burgdorferi protein or an antigenic polypeptide fragment thereof, which may be presented together with a carrier protein, such as an albumin, to an animal system (such as rabbit or mouse) or, if it is long enough (at least about 25 amino acids), without a carrier.

[0139] As used herein, the term “antibody” (Ab) or “monoclonal antibody” (Mab) is meant to include intact molecules, single chain whole antibodies, and antibody fragments. Antibody fragments of the present invention include Fab and F(ab′)2 and other fragments including single-chain Fvs (scFv) and disulfide-linked Fvs (sdFv). Also included in the present invention are chimeric and humanized monoclonal antibodies and polyclonal antibodies specific for the polypeptides of the present invention. The antibodies of the present invention may be prepared by any of a variety of methods. For example, cells expressing a polypeptide of the present invention or an antigenic fragment thereof can be administered to an animal in order to induce the production of sera containing polyclonal antibodies. For example, a preparation of B. burgdorferi polypeptide or fragment thereof is prepared and purified to render it substantially free of natural contaminants. Such a preparation is then introduced into an animal in order to produce polyclonal antisera of greater specific activity.

[0140] In a preferred method, the antibodies of the present invention are monoclonal antibodies or binding fragments thereof. Such monoclonal antibodies can be prepared using hybridoma technology. See, e.g., Harlow et al., ANTIBODIES: A LABORATORY MANUAL, (Cold Spring Harbor Laboratory Press, 2nd ed. 1988); Hammerling, et al., in: MONOCLONAL ANTIBODIES AND T-CELL HYBRIDOMAS 563-681 (Elsevier, N.Y., 1981). Fab and F(ab)2 fragments may be produced by proteolytic cleavage, using enzymes such as papain (to produce Fab fragments) or pepsin (to produce F(ab)2 fragments). Alternatively, B. burgdorferi polypeptide-binding fragments, chimeric, and humanized antibodies can be produced through the application of recombinant DNA technology or through synthetic chemistry using methods known in the art.

[0141] Alternatively, additional antibodies capable of binding to the polypeptide antigen of the present invention may be produced in a two-step procedure through the use of anti-idiotypic antibodies. Such a method makes use of the fact that antibodies are themselves antigens, and that, therefore, it is possible to obtain an antibody which binds to a second antibody. In accordance with this method, B. burgdorferi polypeptide-specific antibodies are used to immunize an animal, preferably a mouse. The splenocytes of such an animal are then used to produce hybridoma cells, and the hybridoma cells are screened to identify clones which produce an antibody whose ability to bind to the B. burgdorferi polypeptide-specific antibody can be blocked by the B. burgdorferi polypeptide antigen. Such antibodies comprise anti-idiotypic antibodies to the B. burgdorferi polypeptide-specific antibody and can be used to immunize an animal to induce formation of further B. burgdorferi polypeptide-specific antibodies.

[0142] Antibodies and fragments thereof of the present invention may be described by the portion of a polypeptide of the present invention recognized or specifically bound by the antibody. Antibody binding fragments of a polypeptide of the present invention may be described or specified in the same manner as for polypeptide fragments discussed above., i.e., by N-terminal and C-terminal positions or by size in contiguous amino acid residues. Any number of antibody binding fragments, of a polypeptide of the present invention, specified by N-terminal and C-terminal positions or by size in amino acid residues, as described above, may also be excluded from the present invention. Therefore, the present invention includes antibodies the specifically bind a particularly described fragment of a polypeptide of the present invention and allows for the exclusion of the same.

[0143] Antibodies and fragments thereof of the present invention may also be described or specified in terms of their cross-reactivity. Antibodies and fragments that do not bind polypeptides of any other species of Borrelia other than B. burgdorferi are included in the present invention. Likewise, antibodies and fragments that bind only species of Borrelia, i.e. antibodies and fragments that do not bind bacteria from any genus other than Borrelia, are included in the present invention.

Diagnostic Assays

[0144] The present invention further relates to methods for assaying staphylococcal infection in an animal by detecting the expression of genes encoding staphylococcal polypeptides of the present invention. The methods comprise analyzing tissue or body fluid from the animal for Borrelia-specific antibodies, nucleic acids, or proteins. Analysis of nucleic acid specific to Borrelia is assayed by PCR or hybridization techniques using nucleic acid sequences of the present invention as either hybridization probes or primers. See, e.g., Sambrook et al. Molecular cloning: A Laboratory Manual (Cold Spring Harbor Laboratory Press, 2nd ed., 1989, page 54 reference); Eremeeva et al. (1994) J. Clin. Microbiol. 32: 803-810 (describing differentiation among spotted fever group Rickettsiae species by analysis of restriction fragment length polymorphism of PCR-amplified DNA) and Chen et al. 1994 J. Clin. Microbiol. 32: 589-595 (detecting B. burgdorferi nucleic acids via PCR).

[0145] Where diagnosis of a disease state related to infection with Borrelia has already been lade, the present invention is useful for monitoring progression or regression of the disease state whereby patients exhibiting enhanced Borrelia gene expression will experience a worse clinical outcome relative to patients expressing these gene(s) at a lower level.

[0146] By “biological sample” is intended any biological sample obtained from an animal, cell line, tissue culture, or other source which contains Borrelia polypeptide, mRNA, or DNA. Biological samples include body fluids (such as saliva, blood, plasma, urine, mucus, synovial fluid, etc.) tissues (such as muscle, skin, and cartilage) and any other biological source suspected of containing Borrelia polypeptides or nucleic acids. Methods for obtaining biological samples such as tissue are well known in the art.

[0147] The present invention is useful for detecting diseases related to Borrelia infections in animals. Preferred animals include monkeys, apes, cats, dogs, birds, cows, pigs, mice, horses, rabbits and humans. Particularly preferred are humans.

[0148] Total RNA can be isolated from a biological sample using any suitable technique such as the single-step guanidinium-thiocyanate-phenol-chloroform method described in Chomczynski et al. (1987) Anal. Biochem. 162: 156-159. mRNA encoding Borrelia polypeptides having sufficient homology to the nucleic acid sequences identified in Table 1 to allow for hybridization between complementary sequences are then assayed using any appropriate method. These include Northern blot analysis, S1 nuclease mapping, the polymerase chain reaction (PCR), reverse transcription in combination with the polymerase chain reaction (RT-PCR), and reverse transcription in combination with the ligase chain reaction (RT-LCR).

[0149] Northern blot analysis can be performed as described in Harada et al. (1990) Cell 63: 303-312. Briefly, total RNA is prepared from a biological sample as described above. For the Northern blot, the RNA is denatured in an appropriate buffer (such as glyoxal/dimethyl sulfoxide/sodium phosphate buffer), subjected to agarose gel electrophoresis, and transferred onto a nitrocellulose filter. After the RNAs have been linked to the filter by a UV linker, the filter is prehybridized in a solution containing formamide, SSC, Denhardt's solution, denatured salmon sperm, SDS, and sodium phosphate buffer. A B. burgdorferi polynucleotide sequence shown in Table 1 labeled according to any appropriate method (such as the ³²P-multiprimed DNA labeling system (Amersham)) is used as probe. After hybridization overnight, the filter is washed and exposed to x-ray film. DNA for use as probe according to the present invention is described in the sections above and will preferably at least 15 nucleotides in length.

[0150] S1 mapping can be performed as described in Fujita et al. (1987) Cell 49: 357-367. To prepare probe DNA for use in S1 mapping, the sense strand of an above-described B. burgdorferi DNA sequence of the present invention is used as a template to synthesize labeled antisense DNA. The antisense DNA can then be digested using an appropriate restriction endonuclease to generate further DNA probes of a desired length. Such antisense probes are useful for visualizing protected bands corresponding to the target mRNA (i.e., mRNA encoding Borrelia polypeptides).

[0151] Levels of mRNA encoding Borrelia polypeptides are assayed, for e.g., using the RT-PCR method described in Makino et al. (1990) Technique 2: 295-301. By this method, the radioactivities of the “amplicons” in the polyacrylamide gel bands are linearly related to the initial concentration of the target mRNA. Briefly, this method involves adding total RNA isolated from a biological sample in a reaction mixture containing a RT primer and appropriate buffer. After incubating for primer annealing, the mixture can be supplemented with a RT buffer, dNTPs, DTT, RNase inhibitor and reverse transcriptase. After incubation to achieve reverse transcription of the RNA, the RT products are then subject to PCR using labeled primers. Alternatively, rather than labeling the primers, a labeled dNTP can be included in the PCR reaction mixture. PCR amplification can be performed in a DNA thermal cycler according to conventional techniques. After a suitable number of rounds to achieve amplification, the PCR reaction mixture is electrophoresed on a polyacrylamide gel. After drying the gel, the radioactivity of the appropriate bands (corresponding to the mRNA encoding the Borrelia polypeptides of the present invention) are quantified using an imaging analyzer. RT and PCR reaction ingredients and conditions, reagent and gel concentrations, and labeling methods are well known in the art. Variations on the RT-PCR method will be apparent to the skilled artisan. Other PCR methods that can detect the nucleic acid of the present invention can be found in PCR PRIMER: A LABORATORY MANUAL (C. W. Dieffenbach et al. eds., Cold Spring Harbor Lab Press, 1995).

[0152] The polynucleotides of the present invention, including both DNA and RNA, may be used to detect polynucleotides of the present invention or Borrelia species including B. burgdorferi using bio chip technology. The present invention includes both high density chip arrays (>1000 oligonucleotides per cm²) and low density chip arrays (<1000 oligonucleotides per cm²). Bio chips comprising arrays of polynucleotides of the present invention may be used to detect Borrelia species, including B. burgdorferi, in biological and environmental samples and to diagnose an animal, including humans, with an B. burgdorferi or other Borrelia infection. The bio chips of the present invention may comprise polynucleotide sequences of other pathogens including bacteria, viral, parasitic, and fungal polynucleotide sequences, in addition to the polynucleotide sequences of the present invention, for use in rapid differential pathogenic detection and diagnosis. The bio chips can also be used to monitor an B. burgdorferi or other Borrelia infections and to monitor the genetic changes (deletions, insertions, mismatches, etc.) in response to drug therapy in the clinic and drug development in the laboratory. The bio chip technology comprising arrays of polynucleotides of the present invention may also be used to simultaneously monitor the expression of a multiplicity of genes, including those of the present invention. The polynucleotides used to comprise a selected array may be specified in the same manner as for the fragments, i.e., by their 5′ and 3′ positions or length in contiguous base pairs and include from. Methods and particular uses of the polynucleotides of the present invention to detect Borrelia species, including B. burgdorferi, using bio chip technology include those known in the art and those of: U.S. Pat. Nos. 5,510,270, 5,545,531, 5,445,934, 5,677,195, 5,532,128, 5,556,752, 5,527,681, 5,451,683, 5,424,186, 5,60,7646, 5,658,732 and World Patent Nos. WO/9710365, WO/9511995, WO/9743447, WO/9535505, each incorporated herein in their entireties.

[0153] Biosensors using the polynucleotides of the present invention may also be used to detect, diagnose, and monitor B. burgdorferi or other Borrelia species and infections thereof. Biosensors using the polynucleotides of the present invention may also be used to detect particular polynucleotides of the present invention. Biosensors using the polynucleotides of the present invention may also be used to monitor the genetic changes (deletions, insertions, mismatches, etc.) in response to drug therapy in the clinic and drug development in the laboratory. Methods and particular uses of the polynucleotides of the present invention to detect Borrelia species, including B. burgdorferi, using biosensors include those known in the art and those of: U.S. Pat. Nos. 5,721,102, 5,658,732, 5631170, and World Patent Nos. WO97/35011, WO/9720203, each incorporated herein in their entireties.

[0154] Thus, the present invention includes both bio chips and biosensors comprising polynucleotides of the present invention and methods of their use.

[0155] Assaying Borrelia polypeptide levels in a biological sample can occur using any art-known method, such as antibody-based techniques. For example, Borrelia polypeptide expression in tissues can be studied with classical immunohistological methods. In these, the specific recognition is provided by the primary antibody (polyclonal or monoclonal) but the secondary detection system can utilize fluorescent, enzyme, or other conjugated secondary antibodies. As a result, an immunohistological staining of tissue section for pathological examination is obtained. Tissues can also be extracted, e.g., with urea and neutral detergent, for the liberation of Borrelia polypeptides for Western-blot or dot/slot assay. See, e.g., Jalkanen, M. et al. (1985) J. Cell. Biol. 101: 976-985; Jalkanen, M. et al. (1987) J. Cell. Biol. 105: 3087-3096. In this technique, which is based on the use of cationic solid phases, quantitation of a Borrelia polypeptide can be accomplished using an isolated Borrelia polypeptide as a standard. This technique can also be applied to body fluids.

[0156] Other antibody-based methods useful for detecting Borrelia polypeptide gene expression include immunoassays, such as the ELISA and the radioimmunoassay (RIA). For example, a Borrelia polypeptide-specific monoclonal antibodies can be used both as an immunoabsorbent and as an enzyme-labeled probe to detect and quantify a Borrelia polypeptide. The amount of a Borrelia polypeptide present in the sample can be calculated by reference to the amount present in a standard preparation using a linear regression computer algorithm. Such an ELISA is described in Iacobelli et al. (1988) Breast Cancer Research and Treatment 11: 19-30. In another ELISA assay, two distinct specific monoclonal antibodies can be used to detect Borrelia polypeptides in a body fluid. In this assay, one of the antibodies is used as the immunoabsorbent and the other as the enzyme-labeled probe.

[0157] The above techniques may be conducted essentially as a “one-step” or “two-step” assay. The “one-step” assay involves contacting the Borrelia polypeptide with immobilized antibody and, without washing, contacting the mixture with the labeled antibody. The “two-step” assay involves washing before contacting the mixture with the labeled antibody. Other conventional methods may also be employed as suitable. It is usually desirable to immobilize one component of the assay system on a support, thereby allowing other components of the system to be brought into contact with the component and readily removed from the sample. Variations of the above and other immunological methods included in the present invention can also be found in Harlow et al., ANTIBODIES: A LABORATORY MANUAL, (Cold Spring Harbor Laboratory Press, 2nd ed. 1988).

[0158] Suitable enzyme labels include, for example, those from the oxidase group, which catalyze the production of hydrogen peroxide by reacting with substrate. Glucose oxidase is particularly preferred as it has good stability and its substrate (glucose) is readily available. Activity of an oxidase label may be assayed by measuring the concentration of hydrogen peroxide formed by the enzyme-labeled antibody/substrate reaction. Besides enzymes, other suitable labels include radioisotopes, such as iodine (¹²⁵I, ¹²¹I), carbon (¹⁴C), sulphur (³⁵S), tritium (³H), indium (¹¹²In), and technetium (^{99m}Tc), and fluorescent labels, such as fluorescein and rhodamine, and biotin.

[0159] Further suitable labels for the Borrelia polypeptide-specific antibodies of the present invention are provided below. Examples of suitable enzyme labels include malate dehydrogenase, Borrelia nuclease, delta-5-steroid isomerase, yeast-alcohol dehydrogenase, alpha-glycerol phosphate dehydrogenase, triose phosphate isomerase, peroxidase, alkaline phosphatase, asparaginase, glucose oxidase, beta-galactosidase, ribonuclease, urease, catalase, glucose-6-phosphate dehydrogenase, glucoamylase, and acetylcholine esterase.

[0160] Examples of suitable radioisotopic labels include ³H, ¹¹¹In, ¹²⁵I, ¹³¹I, ³²P, ³⁵S, ¹⁴C, ⁵¹Cr, ⁵⁷To, ⁵⁸Co, ⁵⁹Fe, ⁷⁵Se, ¹⁵²Eu, ⁹⁰Y, ⁶⁷Cu, ²¹⁷Ci, ²¹¹At, ²¹²Pb, ⁴⁷Sc, ¹⁰⁹Pd, etc. ¹¹¹In is a preferred isotope where in vivo imaging is used since its avoids the problem of dehalogenation of the ¹²⁵I or ¹³¹I-labeled monoclonal antibody by the liver. In addition, this radionucleotide has a more favorable gamma emission energy for imaging. See, e.g., Perkins et al. (1985) Eur. J. Nucl. Med. 10: 296-301; Carasquillo et al. (1987) J. Nucl. Med. 28: 281-287. For example, ¹¹¹In coupled to monoclonal antibodies with 1-(P-isothiocyanatobenzyl)-DPTA has shown little uptake in non-tumors tissues, particularly the liver, and therefore enhances specificity of tumor localization. See, Esteban et al. (1987) J. Nucl. Med. 28: 861-870.

[0161] Examples of suitable non-radioactive isotopic labels include ¹⁵⁷Gd, ⁵⁵Mn, ¹⁶²Dy, ⁵²Tr, and ⁵⁶Fe.

[0162] Examples of suitable fluorescent labels include an ¹⁵²Eu label, a fluorescein label, an isothiocyanate label, a rhodamine label, a phycoerythrin label, a phycocyanin label, an allophycocyanin label, an o-phthaldehyde label, and a fluorescamine label.

[0163] Examples of suitable toxin labels include, Pseudomonas toxin, diphtheria toxin, ricin, and cholera toxin.

[0164] Examples of chemiluminescent labels include a luminal label, an isoluminal label, an aromatic acridinium ester label, an imidazole label, an acridinium salt label, an oxalate ester label, a luciferin label, a luciferase label, and an aequorin label.

[0165] Examples of nuclear magnetic resonance contrasting agents include heavy metal nuclei such as Gd, Mn, and iron.

[0166] Typical techniques for binding the above-described labels to antibodies are provided by Kennedy et al. (1976) Clin. Chim. Acta 70: 1-31, and Schurs et al. (1977) Clin. Chim. Acta 81: 1-40. Coupling techniques mentioned in the latter are the glutaraldehyde method, the periodate method, the dimaleimide method, the m-maleimidobenzyl-N-hydroxy-succinimide ester method, all of which methods are incorporated by reference herein.

[0167] In a related aspect, the invention includes a diagnostic kit for use in screening serum containing antibodies specific against B. burgdorferi infection. Such a kit may include an isolated B. burgdorferi antigen comprising an epitope which is specifically immunoreactive with at least one anti-B. burgdorferi antibody. Such a kit also includes means for detecting the binding of said antibody to the antigen. In specific embodiments, the kit may include a recombinantly produced or chemically synthesized peptide or polypeptide antigen. The peptide or polypeptide antigen may be attached to a solid support.

[0168] In a more specific embodiment, the detecting means of the above-described kit includes a solid support to which said peptide or polypeptide antigen is attached. Such a kit may also include a non-attached reporter-labeled anti-human antibody. In this embodiment, binding of the antibody to the B. burgdorferi antigen can be detected by binding of the reporter labeled antibody to the anti-B. burgdorferi polypeptide antibody.

[0169] In a related aspect, the invention includes a method of detecting B. burgdorferi infection in a subject. This detection method includes reacting a body fluid, preferably serum, from the subject with an isolated B. burgdorferi antigen, and examining the antigen for the presence of bound antibody. In a specific embodiment, the method includes a polypeptide antigen attached to a solid support, and serum is reacted with the support. Subsequently, the support is reacted with a reporter-labeled anti-human antibody. The support is then examined for the presence of reporter-labeled antibody.

[0170] The solid surface reagent employed in the above assays and kits is prepared by known techniques for attaching protein material to solid support material, such as polymeric beads, dip sticks, 96-well plates or filter material. These attachment methods generally include non-specific adsorption of the protein to the support or covalent attachment of the protein, typically through a free amine group, to a chemically reactive group on the solid support, such as an activated carboxyl, hydroxyl, or aldehyde group. Alternatively, streptavidin coated plates can be used in conjunction with biotinylated antigen(s).

[0171] The polypeptides and antibodies of the present invention, including fragments thereof, may be used to detect Borrelia species including B. burgdorferi using bio chip and biosensor technology. Bio chip and biosensors of the present invention may comprise the polypeptides of the present invention to detect antibodies, which specifically recognize Borrelia species, including B. burgdorferi. Bio chip and biosensors of the present invention may also comprise antibodies which specifically recognize the polypeptides of the present invention to detect Borrelia species, including B. burgdorferi or specific polypeptides of the present invention. Bio chips or biosensors comprising polypeptides or antibodies of the present invention may be used to detect Borrelia species, including B. burgdorferi, in biological and environmental samples and to diagnose an animal, including humans, with an B. burgdorferi or other Borrelia infection. Thus, the present invention includes both bio chips and biosensors comprising polypeptides or antibodies of the present invention and methods of their use.

[0172] The bio chips of the present invention may further comprise polypeptide sequences of other pathogens including bacteria, viral, parasitic, and fungal polypeptide sequences, in addition to the polypeptide sequences of the present invention, for use in rapid differential pathogenic detection and diagnosis. The bio chips of the present invention may further comprise antibodies or fragments thereof specific for other pathogens including bacteria, viral, parasitic, and fungal polypeptide sequences, in addition to the antibodies or fragments thereof of the present invention, for use in rapid differential pathogenic detection and diagnosis. The bio chips and biosensors of the present invention may also be used to monitor an B. burgdorferi or other Borrelia infection and to monitor the genetic changes (amino acid deletions, insertions, substitutions, etc.) in response to drug therapy in the clinic and drug development in the laboratory. The bio chip and biosensors comprising polypeptides or antibodies of the present invention may also be used to simultaneously monitor the expression of a multiplicity of polypeptides, including those of the present invention. The polypeptides used to comprise a bio chip or biosensor of the present invention may be specified in the same manner as for the fragments, i.e., by their N-terminal and C-terminal positions or length in contiguous amino acid residue. Methods and particular uses of the polypeptides and antibodies of the present invention to detect Borrelia species, including B. burgdorferi, or specific polypeptides using bio chip and biosensor technology include those known in the art, those of the U.S. Patent Nos. and World Patent Nos. listed above for bio chips and biosensors using polynucleotides of the present invention, and those of: U.S. Pat. Nos. 5,658,732, 5,135,852, 5567301, 5,677,196, 5,690,894 and World Patent Nos. WO9729366, WO9612957, each incorporated herein in their entireties.

Treatment:

Agonists and Antagonists—Assays and Molecules

[0173] The invention also provides a method of screening compounds to identify those which enhance or block the biological activity of the B. burgdorferi polypeptides of the present invention. The present invention further provides where the compounds kill or slow the growth of B. burgdorferi. The ability of B. burgdorferi antagonists, including B. burgdorferi ligands, to prophylactically or therapeutically block antibiotic resistance may be easily tested by the skilled artisan. See, e.g., Straden et al. (1997) J. Bacteriol. 179(1): 9-16.

[0174] An agonist is a compound which increases the natural biological function or which functions in a manner similar to the polypeptides of the present invention, while antagonists decrease or eliminate such functions. Potential antagonists include small organic molecules, peptides, polypeptides, and antibodies that bind to a polypeptide of the invention and thereby inhibit or extinguish its activity.

[0175] The antagonists may be employed for instance to inhibit peptidoglycan cross bridge formation. Antibodies against B. burgdorferi may be employed to bind to and inhibit B. burgdorferi activity to treat antibiotic resistance. Any of the above antagonists may be employed in a composition with a pharmaceutically acceptable carrier.

Vaccines

[0176] The present invention also provides vaccines comprising one or more polypeptides of the present invention. Heterogeneity in the composition of a vaccine may be provided by combining B. burgdorferi polypeptides of the present invention. Multi-component vaccines of this type are desirable because they are likely to be more effective in eliciting protective immune responses against multiple species and strains of the Borrelia genus than single polypeptide vaccines. Thus, as discussed in detail below, a multi-component vaccine of the present invention may contain one or more, preferably 2 to about 20, more preferably 2 to about 15, and most preferably 3 to about 8, of the B. burgdorferi polypeptides shown in Table 1, or fragments thereof.

[0177] Multi-component vaccines are known in the art to elicit antibody production to numerous immunogenic components. Decker, M. and Edwards, K., J. Infect. Dis. 174: S270-275 (1996). In addition, a hepatitis B, diphtheria, tetanus, pertussis tetravalent vaccine has recently been demonstrated to elicit protective levels of antibodies in human infants against all four pathogenic agents. Aristegui, J. et al., Vaccine 15: 7-9 (1997).

[0178] The present invention thus also includes multi-component vaccines. These vaccines comprise more than one polypeptide, immunogen or antigen. An example of such a multi-component vaccine would be a vaccine comprising more than one of the B. burgdorferi polypeptides shown in Table 1. A second example is a vaccine comprising one or more, for example 2 to 10, of the B. burgdorferi polypeptides shown in Table 1 and one or more, for example 2 to 10, additional polypeptides of either borrelial or non-borrelial origin. Thus, a multi-component vaccine which confers protective immunity to both a borrelial infection and infection by another pathogenic agent is also within the scope of the invention.

[0179] As indicated above, the vaccines of the present invention are expected to elicit a protective immune response against infections caused by species and strains of Borrelia other than B. burgdorferi sensu stricto isolate B31 (ATCC Accession No. 35210). Immunizations using decorin-binding protein and OspA derived from one strain of B. burgdorferi has been shown to elicit the production of antiserum which confers passive immunity against other strains of B. burgdorferi. Cassatt, D. et al., Protection of Borrelia burgdorferi Infection by Antibodies to Decorin-binding Protein, in VACCINES97, Cold Spring Harbor Press (1997), pages 191-195. Further, the inventors have found using an in vitro assay that antiserum produced in response to B. burgdorferi decorin-binding protein will kill several species of Borrelia. The amino acid sequences of decorin-binding protein expressed by different strains of B. burgdorferi are believed to diverge by as much as 25%. Thus, antisera elicited against decorin-binding proteins confers passive immunity against Borrelia expressing proteins having only 75% or less amino acid sequence similarity.

[0180] Further within the scope of the invention are whole cell and whole viral vaccines. Such vaccines may be produced recombinantly and involve the expression of one or more of the B. burgdorferi polypeptides shown in Table 1. For example, the B. burgdorferi polypeptides of the present invention may be either secreted or localized intracellular, on the cell surface, or in the periplasmic space. Further, when a recombinant virus is used, the B. burgdorferi polypeptides of the present invention may, for example, be localized in the viral envelope, on the surface of the capsid, or internally within the capsid. Whole cells vaccines which employ cells expressing heterologous proteins are known in the art. See, e.g., Robinson, K. et al., Nature Biotech. 15: 653-657 (1997); Sirard, J. et al., Infect. Immun. 65: 2029-2033 (1997); Chabalgoity, J. et al., Infect. Immun. 65: 2402-2412 (1997). These cells may be administered live or may be killed prior to administration. Chabalgoity, J. et al., supra, for example, report the successful use in mice of a live attenuated Salmonella vaccine strain which expresses a portion of a platyhelminth fatty acid-binding protein as a fusion protein on its cells surface.

[0181] A multi-component vaccine can also be prepared using techniques known in the art by combining one or more B. burgdorferi polypeptides of the present invention, or fragments thereof, with additional non-borrelial components (e.g., diphtheria toxin or tetanus toxin, and/or other compounds known to elicit an immune response). Such vaccines are useful for eliciting protective immune responses to both members of the Borrelia genus and non-borrelial pathogenic agents.

[0182] The vaccines of the present invention also include DNA vaccines. DNA vaccines are currently being developed for a number of infectious diseases. Boyer, J et al., Nat. Med. 3: 526-532 (1997); reviewed in Spier, R., Vaccine 14: 1285-1288 (1996). Such DNA vaccines contain a nucleotide sequence encoding one or more B. burgdorferi polypeptides of the present invention oriented in a manner that allows for expression of the subject polypeptide. The direct administration of plasmid DNA encoding OspA has been shown to elicit protective immunity in mice against borrelial challenge. Luke, C. et al., J. Infect. Dis. 175: 91-97 (1997).

[0183] The present invention also relates to the administration of a vaccine which is co-administered with a molecule capable of modulating immune responses. Kim, J. et al., Nature Biotech. 15: 641-646 (1997), for example, report the enhancement of immune responses produced by DNA immunizations when DNA sequences encoding molecules which stimulate the immune response are co-administered. In a similar fashion, the vaccines of the present invention may be co-administered with either nucleic acids encoding immune modulators or the immune modulators themselves. These immune modulators include granulocyte macrophage colony stimulating factor (GM-CSF) and CD86.

[0184] The vaccines of the present invention may be used to confer resistance to borrelial infection by either passive or active immunization. When the vaccines of the present invention are used to confer resistance to borrelial infection through active immunization, a vaccine of the present invention is administered to an animal to elicit a protective immune response which either prevents or attenuates a borrelial infection. When the vaccines of the present invention are used to confer resistance to borrelial infection through passive immunization, the vaccine is provided to a host animal (e.g., human, dog, or mouse), and the antisera elicited by this antisera is recovered and directly provided to a recipient suspected of having an infection caused by a member of the Borrelia genus.

[0185] The ability to label antibodies, or fragments of antibodies, with toxin molecules provides an additional method for treating borrelial infections when passive immunization is conducted. In this embodiment, antibodies, or fragments of antibodies, capable of recognizing the B. burgdorferi polypeptides disclosed herein, or fragments thereof, as well as other Borrelia proteins, are labeled with toxin molecules prior to their administration to the patient. When such toxin derivatized antibodies bind to Borrelia cells, toxin moieties will be localized to these cells and will cause their death.

[0186] The present invention thus concerns and provides a means for preventing or attenuating a borrelial infection resulting from organisms which have antigens that are recognized and bound by antisera produced in response to the polypeptides of the present invention. As used herein, a vaccine is said to prevent or attenuate a disease if its administration to an animal results either in the total or partial attenuation (i.e., suppression) of a symptom or condition of the disease, or in the total or partial immunity of the animal to the disease.

[0187] The administration of the vaccine (or the antisera which it elicits) may be for either a “prophylactic” or “therapeutic” purpose. When provided prophylactically, the compound(s) are provided in advance of any symptoms of borrelial infection. The prophylactic administration of the compound(s) serves to prevent or attenuate any subsequent infection. When provided therapeutically, the compound(s) is provided upon or after the detection of symptoms which indicate that an animal may be infected with a member of the Borrelia genus. The therapeutic administration of the compound(s) serves to attenuate any actual infection. Thus, the B. burgdorferi polypeptides, and fragments thereof, of the present invention may be provided either prior to the onset of infection (so as to prevent or attenuate an anticipated infection) or after the initiation of an actual infection.

[0188] The polypeptides of the invention, whether encoding a portion of a native protein or a functional derivative thereof, may be administered in pure form or may be coupled to a macromolecular carrier. Example of such carriers are proteins and carbohydrates. Suitable proteins which may act as macromolecular carrier for enhancing the immunogenicity of the polypeptides of the present invention include keyhole limpet hemacyanin (KLH) tetanus toxoid, pertussis toxin, bovine serum albumin, and ovalbumin. Methods for coupling the polypeptides of the present invention to such macromolecular carriers are disclosed in Harlow et al., Antibodies: A Laboratory Manual, 2nd Ed.; Cold Spring Harbor Laboratory Press, Cold Spring Harbor, N.Y. (1988), the entire disclosure of which is incorporated by reference herein.

[0189] A composition is said to be “pharmacologically acceptable” if its administration can be tolerated by a recipient animal and is otherwise suitable for administration to that animal. Such an agent is said to be administered in a “therapeutically effective amount” if the amount administered is physiologically significant. An agent is physiologically significant if its presence results in a detectable change in the physiology of a recipient patient.

[0190] While in all instances the vaccine of the present invention is administered as a pharmacologically acceptable compound, one skilled in the art would recognize that the composition of a pharmacologically acceptable compound varies with the animal to which it is administered. For example, a vaccine intended for human use will generally not be co-administered with Freund's adjuvant. Further, the level of purity of the B. burgdorferi polypeptides of the present invention will normally be higher when administered to a human than when administered to a non-human animal.

[0191] As would be understood by one of ordinary skill in the art, when the vaccine of the present invention is provided to an animal, it may be in a composition which may contain salts, buffers, adjuvants, or other substances which are desirable for improving the efficacy of the composition. Adjuvants are substances that can be used to specifically augment a specific immune response. These substances generally perform two functions: (1) they protect the antigen(s) from being rapidly catabolized after administration and (2) they nonspecifically stimulate immune responses.

[0192] Normally, the adjuvant and the composition are mixed prior to presentation to the immune system, or presented separately, but into the same site of the animal being immunized. Adjuvants can be loosely divided into several groups based upon their composition. These groups include oil adjuvants (for example, Freund's complete and incomplete), mineral salts (for example, AlK(SO₄)₂, AlNa(SO₄)₂, AlNH₄(SO₄), silica, kaolin, and carbon), polynucleotides (for example, poly IC and poly AU acids), and certain natural substances (for example, wax D from Mycobacterium tuberculosis, as well as substances found in Corynebacterium parvum, or Bordetella pertussis, and members of the genus Brucella. Other substances useful as adjuvants are the saponins such as, for example, Quil A. (Superfos A/S, Denmark). Preferred adjuvants for use in the present invention include aluminum salts, such as AlK(SO₄)₂, AlNa(SO₄)₂, and AlNH₄(SO₄). Examples of materials suitable for use in vaccine compositions are provided in Remington's Pharmaceutical Sciences (Osol, A, Ed, Mack Publishing Co, Easton, Pa., pp. 1324-1341 (1980), which reference is incorporated herein by reference).

[0193] The therapeutic compositions of the present invention can be administered parenterally by injection, rapid infusion, nasopharyngeal absorption (intranasopharangeally), dermoabsorption, or orally. The compositions may alternatively be administered intramuscularly, or intravenously. Compositions for parenteral administration include sterile aqueous or non-aqueous solutions, suspensions, and emulsions. Examples of non-aqueous solvents are propylene glycol, polyethylene glycol, vegetable oils such as olive oil, and injectable organic esters such as ethyl oleate. Carriers or occlusive dressings can be used to increase skin permeability and enhance antigen absorption. Liquid dosage forms for oral administration may generally comprise a liposome solution containing the liquid dosage form. Suitable forms for suspending liposomes include emulsions, suspensions, solutions, syrups, and elixirs containing inert diluents commonly used in the art, such as purified water. Besides the inert diluents, such compositions can also include adjuvants, wetting agents, emulsifying and suspending agents, or sweetening, flavoring, or perfuming agents.

[0194] Therapeutic compositions of the present invention can also be administered in encapsulated form. For example, intranasal immunization of mice against Bordetella pertussis infection using vaccines encapsulated in biodegradable microsphere composed of poly(DL-lactide-co-glycolide) has been shown to stimulate protective immune responses. Shahin, R. et al., Infect. Immun. 63: 1195-1200 (1995). Similarly, orally administered encapsulated Salmonella typhimurium antigens have also been shown to elicit protective immunity in mice. Allaoui-Attarki, K. et al., Infect. Immun. 65: 853-857 (1997). Encapsulated vaccines of the present invention can be administered by a variety of routes including those involving contacting the vaccine with mucous membranes (e.g., intranasally, intracolonicly, intraduodenally).

[0195] Many different techniques exist for the timing of the immunizations when a multiple administration regimen is utilized. It is possible to use the compositions of the invention more than once to increase the levels and diversities of expression of the immunoglobulin repertoire expressed by the immunized animal. Typically, if multiple immunizations are given, they will be given one to two months apart.

[0196] According to the present invention, an “effective amount” of a therapeutic composition is one which is sufficient to achieve a desired biological effect. Generally, the dosage needed to provide an effective amount of the composition will vary depending upon such factors as the animal's or human's age, condition, sex, and extent of disease, if any, and other variables which can be adjusted by one of ordinary skill in the art.

[0197] The antigenic preparations of the invention can be administered by either single or multiple dosages of an effective amount. Effective amounts of the compositions of the invention can vary from 0.01-1,000 μg/ml per dose, more preferably 0.1-500 μg/ml per dose, and most preferably 10-300 μg/ml per dose.

[0198] Having now generally described the invention, the same will be more readily understood through reference to the following example which is provided by way of illustration, and is not intended to be limiting of the present invention, unless specified.

### EXAMPLES

[0199] 1. Preparation of PCR Primers and Amplification of DNA

[0200] Various fragments of the Borrelia burgdorferi genome, such as those of Table 1, can be used, in accordance with the present invention, to prepare PCR primers for a variety of uses. The PCR primers are preferably at least 15 bases, and more preferably at least 18 bases in length. When selecting a primer sequence, it is preferred that the primer pairs have approximately the same G/C ratio, so that melting temperatures are approximately the same. The PCR primers and amplified DNA of this Example find use in the Examples that follow.

[0201] 2. Isolation of a Selected DNA Clone from B. burgdorferi

[0202] Three approaches are used to isolate a B. burgdorferi clone comprising a polynucleotide of the present invention from any B. burgdorferi genomic DNA library. The B. burgdorferi strain B31PU has been deposited as a convienent source for obtaining a B. burgdorferi strain although a wide varity of strains B. burgdorferi strains can be used which are known in the art.

[0203] B. burgdorferi genomic DNA is prepared using the following method. A 20 ml overnight bacterial culture grown in a rich medium (e.g., Trypticase Soy Broth, Brain Heart Infusion broth or Super broth), pelleted, ished two times with TES (30 mM Tris-pH 8.0, 25 mM EDTA, 50 mM NaCl), and resuspended in 5 ml high salt TES (2.5M NaCl). Lysostaphin is added to final concentration of approx 50 ug/ml and the mixture is rotated slowly 1 hour at 37 C to make protoplast cells. The solution is then placed in incubator (or place in a shaking water bath) and warmed to 55 C. Five hundred micro liter of 20% sarcosyl in TES (final concentration 2%) is then added to lyse the cells. Next, guanidine HCl is added to a final concentration of 7M (3.69 g in 5.5 ml). The mixture is swirled slowly at 55 C for 60-90 min (solution should clear). A CsCl gradient is then set up in SW41 ultra clear tubes using 2.0 ml 5.7M CsCl and overlaying with 2.85M CsCl. The gradient is carefully overlayed with the DNA-containing GuHCl solution. The gradient is spun at 30,000 rpm, 20 C for 24 hr and the lower DNA band is collected. The volume is increased to 5 ml with TE buffer. The DNA is then treated with protease K (10 ug/ml) overnight at 37 C, and precipitated with ethanol. The precipitated DNA is resuspended in a desired buffer.

[0204] In the first method, a plasmid is directly isolated by screening a plasmid B. burgdorferi genomic DNA library using a polynucleotide probe corresponding to a polynucleotide of the present invention. Particularly, a specific polynucleotide with 30-40 nucleotides is synthesized using an Applied Biosystems DNA synthesizer according to the sequence reported. The oligonucleotide is labeled, for instance, with ³²P-γ-ATP using T4 polynucleotide kinase and purified according to routine methods. (See, e.g., Maniatis et al., Molecular Cloning: A Laboratory Manual, Cold Spring Harbor Press, Cold Spring, N.Y. (1982).) The library is transformed into a suitable host, as indicated above (such as XL-1 Blue (Stratagene)) using techniques known to those of skill in the art. See, e.g., Sambrook et al. MOLECULAR CLONING: A LABORATORY MANUAL (Cold Spring Harbor, N.Y. 2nd ed. 1989); Ausubel et al., CURRENT PROTOCALS IN MOLECULAR BIOLOGY (John Wiley and Sons, N.Y. 1989). The transformants are plated on 1.5% agar plates (containing the appropriate selection agent, e.g., ampicillin) to a density of about 150 transformants (colonies) per plate. These plates are screened using Nylon membranes according to routine methods for bacterial colony screening. See, e.g., Sambrook et al. MOLECULAR CLONING: A LABORATORY MANUAL (Cold Spring Harbor, N.Y. 2nd ed. 1989); Ausubel et al., CURRENT PROTOCALS IN MOLECULAR BIOLOGY (John Wiley and Sons, N.Y. 1989) or other techniques known to those of skill in the art.

[0205] Alternatively, two primers of 15-25 nucleotides derived from the 5′ and 3 ends of a polynucleotide of Table 1 are synthesized and used to amplify the desired DNA by PCR using a B. burgdorferi genomic DNA prep as a template. PCR is carried out under routine conditions, for instance, in 25 VI of reaction mixture with 0.5 ug of the above DNA template. A convenient reaction mixture is 1.5-5 mM MgCl₂, 0.01% (w/v) gelatin, 20 μM each of dATP, dCTP, dGTP, dTTP, 25 pmol of each primer and 0.25 Unit of Taq polymerase. Thirty five cycles of PCR (denaturation at 94° C. for 1 min; annealing at 55° C. for 1 min; elongation at 72° C. for 1 min) are performed with a Perkin-Elmer Cetus automated thermal cycler. The amplified product is analyzed by agarose gel electrophoresis and the DNA band with expected molecular weight is excised and purified. The PCR product is verified to be the selected sequence by subcloning and sequencing the DNA product.

[0206] Finally, overlapping oligos of the DNA sequences of Table 1 can be chemically synthesized and used to generate a nucleotide sequence of desired length using PCR methods known in the art.

[0207] 3(a). Expression and Purification Borrelia Polypeptides in E. coli

[0208] The bacterial expression vector pQE60 is used for bacterial expression of some of the polypeptide fragments of the present invention. (QIAGEN, Inc., 9259 Eton Avenue, Chatsworth, Calif., 91311). pQE60 encodes ampicillin antibiotic resistance (“Ampr”) and contains a bacterial origin of replication (“ori”), an IPTG inducible promoter, a ribosome binding site (“RBS”), six codons encoding histidine residues that allow affinity purification using nickel-nitrilo-tri-acetic acid (“Ni-NTA”) affinity resin (QIAGEN, Inc., supra) and suitable single restriction enzyme cleavage sites. These elements are arranged such that an inserted DNA fragment encoding a polypeptide expresses that polypeptide with the six His residues (i.e., a “6×His tag”) covalently linked to the carboxyl terminus of that polypeptide.

[0209] The DNA sequence encoding the desired portion of a B. burgdorferi protein of the present invention is amplified from B. burgdorferi genomic DNA using PCR oligonucleotide primers which anneal to the 5′ and 3′ sequences coding for the portions of the B. burgdorferi polynucleotide shown in Table 1. Additional nucleotides containing restriction sites to facilitate cloning in the pQE60 vector are added to the 5′ and 3′ sequences, respectively.

[0210] For cloning the mature protein, the 5′ primer has a sequence containing an appropriate restriction site followed by nucleotides of the amino terminal coding sequence of the desired B. burgdorferi polynucleotide sequence in Table 1. One of ordinary skill in the art would appreciate that the point in the protein coding sequence where the 5′ and 3′ primers begin may be varied to amplify a DNA segment encoding any desired portion of the complete protein shorter or longer than the mature form. The 3′ primer has a sequence containing an appropriate restriction site followed by nucleotides complementary to the 3′ end of the polypeptide coding sequence of Table 1, excluding a stop codon, with the coding sequence aligned with the restriction site so as to maintain its reading frame with that of the six His codons in the pQE60 vector.

[0211] The amplified B. burgdorferi DNA fragment and the vector pQE60 are digested with restriction enzymes which recognize the sites in the primers and the digested DNAs are then ligated together. The B. burgdorferi DNA is inserted into the restricted pQE60 vector in a manner which places the B. burgdorferi protein coding region downstream from the IPTG-inducible promoter and in-frame with an initiating AUG and the six histidine codons.

[0212] The ligation mixture is transformed into competent E. coli cells using standard procedures such as those described by Sambrook et al., supra. E. coli strain M15/rep4, containing multiple copies of the plasmid pREP4, which expresses the lac repressor and confers kanamycin resistance (“Kanr”), is used in carrying out the illustrative example described herein. This strain, which is only one of many that are suitable for expressing a B. burgdorferi polypeptide, is available commercially (QIAGEN, Inc., supra). Transformants are identified by their ability to grow on LB agar plates in the presence of ampicillin and kanamycin. Plasmid DNA is isolated from resistant colonies and the identity of the cloned DNA confirmed by restriction analysis, PCR and DNA sequencing.

[0213] Clones containing the desired constructs are grown overnight (“O/N”) in liquid culture in LB media supplemented with both ampicillin (100 μg/ml) and kanamycin (25 μg/ml). The O/N culture is used to inoculate a large culture, at a dilution of approximately 1:25 to 1:250. The cells are grown to an optical density at 600 nm (“OD600”) of between 0.4 and 0.6. Isopropyl-β-D-thiogalactopyranoside (“IPTG”) is then added to a final concentration of 1 mM to induce transcription from the lac repressor sensitive promoter, by inactivating the lacI repressor. Cells subsequently are incubated further for 3 to 4 hours. Cells then are harvested by centrifugation.

[0214] The cells are then stirred for 3-4 hours at 4° C. in 6M guanidine-HCl, pH 8. The cell debris is removed by centrifugation, and the supernatant containing the B. burgdorferi polypeptide is loaded onto a nickel-nitrilo-tri-acetic acid (“Ni-NTA”) affinity resin column (QIAGEN, Inc., supra). Proteins with a 6×His tag bind to the Ni-NTA resin with high affinity are purified in a simple one-step procedure (for details see: The QIAexpressionist, 1995, QIAGEN, Inc., supra). Briefly the supernatant is loaded onto the column in 6 M guanidine-HCl, pH 8, the column is first washed with 10 volumes of 6 M guanidine-HCl, pH 8, then washed with 10 volumes of 6 M guanidine-HCl pH 6, and finally the B. burgdorferi polypeptide is eluted with 6 M guanidine-HCl, pH 5.

[0215] The purified protein is then renatured by dialyzing it against phosphate-buffered saline (PBS) or 50 mM Na-acetate, pH 6 buffer plus 200 mM NaCl. Alternatively, the protein could be successfully refolded while immobilized on the Ni-NTA column. The recommended conditions are as follows: renature using a linear 6M-1M urea gradient in 500 mM NaCl, 20% glycerol, 20 mM Tris/HCl pH 7.4, containing protease inhibitors. The renaturation should be performed over a period of 1.5 hours or more. After renaturation the proteins can be eluted by the addition of 250 mM immidazole. Immidazole is removed by a final dialyzing step against PBS or 50 mM sodium acetate pH 6 buffer plus 200 mM NaCl. The purified protein is stored at 4° C. or frozen at −80° C.

[0216] The polypeptide of the present invention are also prepared using a non-denaturing protein purification method. For these polypeptides, the cell pellet from each liter of culture is resuspended in 25 mls of Lysis Buffer A at 4° C. (Lysis Buffer A=50 mM Na-phosphate, 300 mM NaCl, 10 mM 2-mercaptoethanol, 10% Glycerol, pH 7.5 with 1 tablet of Complete EDTA-free protease inhibitor cocktail (Boehringer Mannheim #1873580) per 50 ml of buffer). Absorbance at 550 nm is approximately 10-20 O.D./ml. The suspension is then put through three freeze/thaw cycles from −70° C. (using a ethanol-dry ice bath) up to room temperature. The cells are lysed via sonication in short 10 sec bursts over 3 minutes at approximately 80 W while kept on ice. The sonicated sample is then centrifuged at 15,000 RPM for 30 minutes at 4° C. The supernatant is passed through a column containing 1.0 ml of CL-4B resin to pre-clear the sample of any proteins that may bind to agarose non-specifically, and the flow-through fraction is collected.

[0217] The pre-cleared flow-through is applied to a nickel-nitrilo-tri-acetic acid (“Ni-NTA”) affinity resin column (Qiagen, Inc., supra). Proteins with a 6×His tag bind to the Ni-NTA resin with high affinity and can be purified in a simple one-step procedure. Briefly, the supernatant is loaded onto the column in Lysis Buffer A at 4° C., the column is first washed with 10 volumes of Lysis Buffer A until the A280 of the eluate returns to the baseline. Then, the column is washed with 5 volumes of 40 mM Imidazole (92% Lysis Buffer A/8% Buffer B) (Buffer B=50 mM Na-Phosphate, 300 mM NaCl, 10% Glycerol, 10 mM 2-mercaptoethanol, 500 mM Imidazole, pH of the final buffer should be 7.5). The protein is eluted off of the column with a series of increasing Imidazole solutions made by adjusting the ratios of Lysis Buffer A to Buffer B. Three different concentrations are used: 3 volumes of 75 mM Imidazole, 3 volumes of 150 mM Imidazole, 5 volumes of 500 mM Imidazole. The fractions containing the purified protein are analyzed using 8%, 10% or 14% SDS-PAGE depending on the protein size. The purified protein is then dialyzed 2× against phosphate-buffered saline (PBS) in order to place it into an easily workable buffer. The purified protein is stored at 4° C. or frozen at −80°.

[0218] The following alternative method may be used to purify B. burgdorferi expressed in E coli when it is present in the form of inclusion bodies. Unless otherwise specified, all of the following steps are conducted at 4-10° C.

[0219] Upon completion of the production phase of the E. coli fermentation, the cell culture is cooled to 4-10° C. and the cells are harvested by continuous centrifugation at 15,000 rpm (Heraeus Sepatech). On the basis of the expected yield of protein per unit weight of cell paste and the amount of purified protein required, an appropriate amount of cell paste, by weight, is suspended in a buffer solution containing 100 mM Tris, 50 mM EDTA, pH 7.4. The cells are dispersed to a homogeneous suspension using a high shear mixer.

[0220] The cells are then lysed by passing the solution through a microfluidizer (Microfluidics, Corp. or APV Gaulin, Inc.) twice at 4000-6000 psi. The homogenate is then mixed with NaCl solution to a final concentration of 0.5 M NaCl, followed by centrifugation at 7000×g for 15 min. The resultant pellet is washed again using 0.5M NaCl, 100 mM Tris, 50 mM EDTA, pH 7.4.

[0221] The resulting washed inclusion bodies are solubilized with 1.5 M guanidine hydrochloride (GuHCl) for 2-4 hours. After 7000×g centrifugation for 15 min., the pellet is discarded and the B. burgdorferi polypeptide-containing supernatant is incubated at 4° C. overnight to allow further GuHCl extraction.

[0222] Following high speed centrifugation (30,000×g) to remove insoluble particles, the GuHCl solubilized protein is refolded by quickly mixing the GuHCl extract with 20 volumes of buffer containing 50 mM sodium, pH 4.5, 150 mM NaCl, 2 mM EDTA by vigorous stirring. The refolded diluted protein solution is kept at 4° C. without mixing for 12 hours prior to further purification steps.

[0223] To clarify the refolded B. burgdorferi polypeptide solution, a previously prepared tangential filtration unit equipped with 0.16 μm membrane filter with appropriate surface area (e.g., Filtron), equilibrated with 40 mM sodium acetate, pH 6.0 is employed. The filtered sample is loaded onto a cation exchange resin (e.g., Poros HS-50, Perseptive Biosystems). The column is washed with 40 mM sodium acetate, pH 6.0 and eluted with 250 mM, 500 mM, 1000 mM, and 1500 mM NaCl in the same buffer, in a stepwise manner. The absorbance at 280 mm of the effluent is continuously monitored. Fractions are collected and further analyzed by SDS-PAGE.

[0224] Fractions containing the B. burgdorferi polypeptide are then pooled and mixed with 4 volumes of water. The diluted sample is then loaded onto a previously prepared set of tandem columns of strong anion (Poros HQ-50, Perseptive Biosystems) and weak anion (Poros CM-20, Perseptive Biosystems) exchange resins. The columns are equilibrated with 40 mM sodium acetate, pH 6.0. Both columns are washed with 40 mM sodium acetate, pH 6.0, 200 mM NaCl. The CM-20 column is then eluted using a 10 column volume linear gradient ranging from 0.2 M NaCl, 50 mM sodium acetate, pH 6.0 to 1.0 M NaCl, 50 mM sodium acetate, pH 6.5. Fractions are collected under constant A₂₈₀ monitoring of the effluent. Fractions containing the B. burgdorferi polypeptide (determined, for instance, by 16% SDS-PAGE) are then pooled.

[0225] The resultant B. burgdorferi polypeptide exhibits greater than 95% purity after the above refolding and purification steps. No major contaminant bands are observed from Commassie blue stained 16% SDS-PAGE gel when 5 μg of purified protein is loaded. The purified protein is also tested for endotoxin/LPS contamination, and typically the LPS content is less than 0.1 ng/ml according to LAL assays.

[0226] 3(b). Alternative Expression and Purification Borrelia Polypeptides in E. coli

[0227] The vector pQE10 is alternatively used to clone and express some of the polypeptides of the present invention for use in the soft tissue and systemic infection models discussed below. The difference being such that an inserted DNA fragment encoding a polypeptide expresses that polypeptide with the six His residues (i.e., a “6×His tag”) covalently linked to the amino terminus of that polypeptide. The bacterial expression vector pQE10 (QIAGEN, Inc., 9259 Eton Avenue, Chatsworth, Calif., 91311) was used in this example. The components of the pQE10 plasmid are arranged such that the inserted DNA sequence encoding a polypeptide of the present invention expresses the polypeptide with the six His residues (i.e., a “6×His tag”)) covalently linked to the amino terminus.

[0228] The DNA sequences encoding the desired portions of a polypeptide of Table 1 were amplified using PCR oligonucleotide primers from genomic B. burgdorferi DNA. The PCR primers anneal to the nucleotide sequences encoding the desired amino acid sequence of a polypeptide of the present invention. Additional nucleotides containing restriction sites to facilitate cloning in the pQE10 vector were added to the 5′ and 3′ primer sequences, respectively.

[0229] For cloning a polypeptide of the present invention, the 5′ and 3′ primers were selected to amplify their respective nucleotide coding sequences. One of ordinary skill in the art would appreciate that the point in the protein coding sequence where the 5′ and 3′ primers begins may be varied to amplify a DNA segment encoding any desired portion of a polypeptide of the present invention. The 5′ primer was designed so the coding sequence of the 6×His tag is aligned with the restriction site so as to maintain its reading frame with that of B. burgdorferi polypeptide. The 3′ was designed to include an stop codon. The amplified DNA fragment was then cloned, and the protein expressed, as described above for the pQE60 plasmid.

[0230] The DNA sequences of Table 1 encoding amino acid sequences may also be cloned and expressed as fusion proteins by a protocol similar to that described directly above, wherein the pET-32b(+) vector (Novagen, 601 Science Drive, Madison, Wis. 53711) is preferentially used in place of pQE10.

[0231] The above methods are not limited to the polypeptide fragments actually produced. The above method, like the methods below, can be used to produce either full length polypeptides or desired fragments thereof.

[0232] 3(c). Alternative Expression and Purification of Borrelia Polypeptides in E. coli

[0233] The bacterial expression vector pQE60 is used for bacterial expression in this example (QIAGEN, Inc., 9259 Eton Avenue, Chatsworth, Calif., 91311). However, in this example, the polypeptide coding sequence is inserted such that translation of the six His codons is prevented and, therefore, the polypeptide is produced with no 6×His tag.

[0234] The DNA sequence encoding the desired portion of the B. burgdorferi amino acid sequence is amplified from an B. burgdorferi genomic DNA prep the deposited DNA clones using PCR oligonucleotide primers which anneal to the 5′ and 3′ nucleotide sequences corresponding to the desired portion of the B. burgdorferi polypeptides. Additional nucleotides containing restriction sites to facilitate cloning in the pQE60 vector are added to the 5′ and 3′ primer sequences.

[0235] For cloning a B. burgdorferi polypeptides of the present invention, 5′ and 3′ primers are selected to amplify their respective nucleotide coding sequences. One of ordinary skill in the art would appreciate that the point in the protein coding sequence where the 5′ and 3′ primers begin may be varied to amplify a DNA segment encoding any desired portion of a polypeptide of the present invention. The 3′ and 5′ primers contain appropriate restriction sites followed by nucleotides complementary to the 5′ and 3′ ends of the coding sequence respectively. The 3′ primer is additionally designed to include an in-frame stop codon.

[0236] The amplified B. burgdorferi DNA fragments and the vector pQE60 are digested with restriction enzymes recognizing the sites in the primers and the digested DNAs are then ligated together. Insertion of the B. burgdorferi DNA into the restricted pQE60 vector places the B. burgdorferi protein coding region including its associated stop codon downstream from the IPTG-inducible promoter and in-frame with an initiating AUG. The associated stop codon prevents translation of the six histidine codons downstream of the insertion point.

[0237] The ligation mixture is transformed into competent E. coli cells using standard procedures such as those described by Sambrook et al. E. coli strain M15/rep4, containing multiple copies of the plasmid pREP4, which expresses the lac repressor and confers kanamycin resistance (“Kanr”), is used in carrying out the illustrative example described herein. This strain, which is only one of many that are suitable for expressing B. burgdorferi polypeptide, is available commercially (QIAGEN, Inc., supra). Transformants are identified by their ability to grow on LB plates in the presence of ampicillin and kanamycin. Plasmid DNA is isolated from resistant colonies and the identity of the cloned DNA confirmed by restriction analysis, PCR and DNA sequencing.

[0238] Clones containing the desired constructs are grown overnight (“O/N”) in liquid culture in LB media supplemented with both ampicillin (100 μg/ml) and kanamycin (25 μg/ml). The O/N culture is used to inoculate a large culture, at a dilution of approximately 1:25 to 1:250. The cells are grown to an optical density at 600 nm (“OD600”) of between 0.4 and 0.6. isopropyl-b-D-thiogalactopyranoside (“IPTG”) is then added to a final concentration of 1 mM to induce transcription from the lac repressor sensitive promoter, by inactivating the lacI repressor. Cells subsequently are incubated further for 3 to 4 hours. Cells then are harvested by centrifugation.

[0239] To purify the B. burgdorferi polypeptide, the cells are then stirred for 3-4 hours at 4° C. in 6M guanidine-HCl, pH 8. The cell debris is removed by centrifugation, and the supernatant containing the B. burgdorferi polypeptide is dialyzed against 50 mM Na-acetate buffer pH 6, supplemented with 200 mM NaCl. Alternatively, the protein can be successfully refolded by dialyzing it against 500 mM NaCl, 20% glycerol, 25 mM Tris/HCl pH 7.4, containing protease inhibitors. After renaturation the protein can be purified by ion exchange, hydrophobic interaction and size exclusion chromatography. Alternatively, an affinity chromatography step such as an antibody column can be used to obtain pure B. burgdorferi polypeptide. The purified protein is stored at 4° C. or frozen at −80° C.

[0240] The following alternative method may be used to purify B. burgdorferi polypeptides expressed in E coli when it is present in the form of inclusion bodies. Unless otherwise specified, all of the following steps are conducted at 4-10° C.

[0241] Upon completion of the production phase of the E. coli fermentation, the cell culture is cooled to 4-10° C. and the cells are harvested by continuous centrifugation at 15,000 rpm (Heraeus Sepatech). On the basis of the expected yield of protein per unit weight of cell paste and the amount of purified protein required, an appropriate amount of cell paste, by weight, is suspended in a buffer solution containing 100 mM Tris, 50 mM EDTA, pH 7.4. The cells are dispersed to a homogeneous suspension using a high shear mixer.

[0242] The cells ware then lysed by passing the solution through a microfluidizer (Microfuidics, Corp. or APV Gaulin, Inc.) twice at 4000-6000 psi. The homogenate is then mixed with NaCl solution to a final concentration of 0.5 M NaCl, followed by centrifugation at 7000×g for 15 min. The resultant pellet is washed again using 0.5M NaCl, 100 mM Tris, 50 mM EDTA, pH 7.4.

[0243] The resulting washed inclusion bodies are solubilized with 1.5 M guanidine hydrochloride (GuHCl) for 2-4 hours. After 7000×g centrifugation for 15 min., the pellet is discarded and the B. burgdorferi polypeptide-containing supernatant is incubated at 4° C. overnight to allow further GuHCl extraction.

[0244] Following high speed centrifugation (30,000×g) to remove insoluble particles, the GuHCl solubilized protein is refolded by quickly mixing the GuHCl extract with 20 volumes of buffer containing 50 mM sodium, pH 4.5, 150 mM NaCl, 2 mM EDTA by vigorous stirring. The refolded diluted protein solution is kept at 4° C. without mixing for 12 hours prior to further purification steps.

[0245] To clarify the refolded B. burgdorferi polypeptide solution, a previously prepared tangential filtration unit equipped with 0.16 μm membrane filter with appropriate surface area (e.g., Filtron), equilibrated with 40 mM sodium acetate, pH 6.0 is employed. The filtered sample is loaded onto a cation exchange resin (e.g., Poros HS-50, Perseptive Biosystems). The column is washed with 40 mM sodium acetate, pH 6.0 and eluted with 250 mM, 500 mM, 1000 mM, and 1500 mM NaCl in the same buffer, in a stepwise manner. The absorbance at 280 mm of the effluent is continuously monitored. Fractions are collected and further analyzed by SDS-PAGE.

[0246] Fractions containing the B. burgdorferi polypeptide are then pooled and mixed with 4 volumes of water. The diluted sample is then loaded onto a previously prepared set of tandem columns of strong anion (Poros HQ-50, Perseptive Biosystems) and weak anion (Poros CM-20, Perseptive Biosystems) exchange resins. The columns are equilibrated with 40 mM sodium acetate, pH 6.0. Both columns are washed with 40 mM sodium acetate, pH 6.0, 200 mM NaCl. The CM-20 column is then eluted using a 10 column volume linear gradient ranging from 0.2 M NaCl, 50 mM sodium acetate, pH 6.0 to 1.0 M NaCl, 50 mM sodium acetate, pH 6.5. Fractions are collected under constant A₂₈₀ monitoring of the effluent. Fractions containing the B. burgdorferi polypeptide (determined, for instance, by 16% SDS-PAGE) are then pooled.

[0247] The resultant B. burgdorferi polypeptide exhibits greater than 95% purity after the above refolding and purification steps. No major contaminant bands are observed from Commassie blue stained 16% SDS-PAGE gel when 5 μg of purified protein is loaded. The purified protein is also tested for endotoxin/LPS contamination, and typically the LPS content is less than 0.1 ng/ml according to LAL assays.

[0248] 3(d). Cloning and Expression of B. burgdorferi in Other Bacteria

[0249] B. burgdorferi polypeptides can also be produced in: B. burgdorferi using the methods of S. Skinner et al., (1988) Mol. Microbiol. 2: 289-297 or J. I. Moreno (1996) Protein Expr. Purif. 8(3): 332-340; Lactobacillus using the methods of C. Rush et al., 1997 Appl. Microbiol. Biotechnol. 47(5): 537-542; or in Bacillus subtilis using the methods Chang et al., U.S. Pat. No. 4,952,508.

[0250] Cloning and Expression in COS Cells

[0251] A B. burgdorferi expression plasmid is made by cloning a portion of the DNA encoding a B. burgdorferi polypeptide into the expression vector pDNAI/Amp or pDNAIII (which can be obtained from Invitrogen, Inc.). The expression vector pDNAI/amp contains: (1) an E. coli origin of replication effective for propagation in E. coli and other prokaryotic cells; (2) an ampicillin resistance gene for selection of plasmid-containing prokaryotic cells; (3) an SV40 origin of replication for propagation in eukaryotic cells; (4) a CMV promoter, a polylinker, an SV40 intron; (5) several codons encoding a hemagglutinin fragment (i.e., an “HA” tag to facilitate purification) followed by a termination codon and polyadenylation signal arranged so that a DNA can be conveniently placed under expression control of the CMV promoter and operably linked to the SV40 intron and the polyadenylation signal by means of restriction sites in the polylinker. The HA tag corresponds to an epitope derived from the influenza hemagglutinin protein described by Wilson et al. 1984 Cell 37: 767. The fusion of the HA tag to the target protein allows easy detection and recovery of the recombinant protein with an antibody that recognizes the HA epitope. pDNAIII contains, in addition, the selectable neomycin marker.

[0252] A DNA fragment encoding a B. burgdorferi polypeptide is cloned into the polylinker region of the vector so that recombinant protein expression is directed by the CMV promoter. The plasmid construction strategy is as follows. The DNA from a B. burgdorferi genomic DNA prep is amplified using primers that contain convenient restriction sites, much as described above for construction of vectors for expression of B. burgdorferi in E. coli. The 5′ primer contains a Kozak sequence, an AUG start codon, and nucleotides of the 5′ coding region of the B. burgdorferi polypeptide. The 3′ primer, contains nucleotides complementary to the 3′ coding sequence of the B. burgdorferi DNA, a stop codon, and a convenient restriction site.

[0253] The PCR amplified DNA fragment and the vector, pDNAI/Amp, are digested with appropriate restriction enzymes and then ligated. The ligation mixture is transformed into an appropriate E. coli strain such as SURE™ (Stratagene Cloning Systems, La Jolla, Calif. 92037), and the transformed culture is plated on ampicillin media plates which then are incubated to allow growth of ampicillin resistant colonies. Plasmid DNA is isolated from resistant colonies and examined by restriction analysis or other means for the presence of the fragment encoding the B. burgdorferi polypeptide.

[0254] For expression of a recombinant B. burgdorferi polypeptide, COS cells are transfected with an expression vector, as described above, using DEAE-dextran, as described, for instance, by Sambrook et al. (supra). Cells are incubated under conditions for expression of B. burgdorferi by the vector.

[0255] Expression of the B. burgdorferi-HA fusion protein is detected by radiolabeling and immunoprecipitation, using methods described in, for example Harlow et al., supra. To this end, two days after transfection, the cells are labeled by incubation in media containing ³⁵S-cysteine for 8 hours. The cells and the media are collected, and the cells are washed and the lysed with detergent-containing RIPA buffer: 150 mM NaCl, 1% NP-40, 0.1% SDS, 1% NP-40, 0.5% DOC, 50 mM TRIS, pH 7.5, as described by Wilson et al. (supra). Proteins are precipitated from the cell lysate and from the culture media using an HA-specific monoclonal antibody. The precipitated proteins then are analyzed by SDS-PAGE and autoradiography. An expression product of the expected size is seen in the cell lysate, which is not seen in negative controls.

5. Cloning and Expression in CHO Cells

[0256] The vector pC4 is used for the expression of B. burgdorferi polypeptide in this example. Plasmid pC4 is a derivative of the plasmid pSV2-dhfr (ATCC Accession No. 37146). The plasmid contains the mouse DHFR gene under control of the SV40 early promoter. Chinese hamster ovary cells or other cells lacking dihydrofolate activity that are transfected with these plasmids can be selected by growing the cells in a selective medium (alpha minus MEM, Life Technologies) supplemented with the chemotherapeutic agent methotrexate. The amplification of the DHFR genes in cells resistant to methotrexate (MTX) has been well documented. See, e.g., Alt et al., 1978, J. Biol. Chem. 253: 1357-1370; Hamlin et al., 1990, Biochem. et Biophys. Acta, 1097: 107-143; Page et al., 1991, Biotechnology 9: 64-68. Cells grown in increasing concentrations of MTX develop resistance to the drug by overproducing the target enzyme, DHFR, as a result of amplification of the DHFR gene. If a second gene is linked to the DHFR gene, it is usually co-amplified and over-expressed. It is known in the art that this approach may be used to develop cell lines carrying more than 1,000 copies of the amplified gene(s). Subsequently, when the methotrexate is withdrawn, cell lines are obtained which contain the amplified gene integrated into one or more chromosome(s) of the host cell.

[0257] Plasmid pC4 contains the strong promoter of the long terminal repeat (LTR) of the Rouse Sarcoma Virus, for expressing a polypeptide of interest, Cullen, et al. (1985) Mol. Cell. Biol. 5: 438-447; plus a fragment isolated from the enhancer of the immediate early gene of human cytomegalovirus (CMV), Boshart, et al., 1985, Cell 41: 521-530. Downstream of the promoter are the following single restriction enzyme cleavage sites that allow the integration of the genes: Bam HI, Xba I, and Asp 718. Behind these cloning sites the plasmid contains the 3′ intron and polyadenylation site of the rat preproinsulin gene. Other high efficiency promoters can also be used for the expression, e.g., the human β-actin promoter, the SV40 early or late promoters or the long terminal repeats from other retroviruses, e.g., HIV and HTLVI. Clontech's Tet-Off and Tet-On gene expression systems and similar systems can be used to express the B. burgdorferi polypeptide in a regulated way in mammalian cells (Gossen et al., 1992, Proc. Natl. Acad. Sci. USA 89: 5547-5551. For the polyadenylation of the mRNA other signals, e.g., from the human growth hormone or globin genes can be used as well. Stable cell lines carrying a gene of interest integrated into the chromosomes can also be selected upon co-transfection with a selectable marker such as gpt, G418 or hygromycin. It is advantageous to use more than one selectable marker in the beginning, e.g., G418 plus methotrexate.

[0258] The plasmid pC4 is digested with the restriction enzymes and then dephosphorylated using calf intestinal phosphates by procedures known in the art. The vector is then isolated from a 1% agarose gel. The DNA sequence encoding the B. burgdorferi polypeptide is amplified using PCR oligonucleotide primers corresponding to the 5′ and 3′ sequences of the desired portion of the gene. A 5′ primer containing a restriction site, a Kozak sequence, an AUG start codon, and nucleotides of the 5′ coding region of the B. burgdorferi polypeptide is synthesized and used. A 3′ primer, containing a restriction site, stop codon, and nucleotides complementary to the 3′ coding sequence of the B. burgdorferi polypeptides is synthesized and used. The amplified fragment is digested with the restriction endonucleases and then purified again on a 1% agarose gel. The isolated fragment and the dephosphorylated vector are then ligated with T4 DNA ligase. E. coli HB 101 or XL-1 Blue cells are then transformed and bacteria are identified that contain the fragment inserted into plasmid pC4 using, for instance, restriction enzyme analysis.

[0259] Chinese hamster ovary cells lacking an active DHFR gene are used for transfection. Five μg of the expression plasmid pC4 is cotransfected with 0.5 μg of the plasmid pSVneo using a lipid-mediated transfection agent such as Lipofectin™ or LipofectAMINE™ (Life Technologies Gaithersburg, Md.). The plasmid pSV2-neo contains a dominant selectable marker, the neo gene from Tn5 encoding an enzyme that confers resistance to a group of antibiotics including G418. The cells are seeded in alpha minus MEM supplemented with 1 mg/ml G418. After 2 days, the cells are trypsinized and seeded in hybridoma cloning plates (Greiner, Germany) in alpha minus MEM supplemented with 10, 25, or 50 ng/ml of methotrexate plus 1 mg/ml G418. After about 10-14 days single clones are trypsinized and then seeded in 6-well petri dishes or 10 ml flasks using different concentrations of methotrexate (50 nM, 100 nM, 200 nM, 400 nM, 800 nM). Clones growing at the highest concentrations of methotrexate are then transferred to new 6-well plates containing even higher concentrations of methotrexate (1 μM, 2 μM, 5 μM, 10 mM, 20 mM). The same procedure is repeated until clones are obtained which grow at a concentration of 100-200 μM. Expression of the desired gene product is analyzed, for instance, by SDS-PAGE and Western blot or by reversed phase HPLC analysis.

[0260] 6. Immunization and Detection of Immune Responses

[0261] 6(a). B. burgdorferi Propagation

[0262] B. burgdorferi sensu stricto isolate B31 is propagated in tightly-closed containers at 34° C. in modified Barbour-Stoenner-Kelly (BSKII) medium (Barbour, A. G., Yale J. Biol. Med. 57: 521-525 (1984)) overlaid with a 5% O₂/5% CO₂/90% N₂ gas mixture. Cell densities of these cultures are determined by darkfield microscopy at 400×.

[0263] Immunization of Mice and Challenge with B. burgdorferi. For active immunizations BALB/cByJ mice (BALB, Jackson Laboratories) are injected intraperitoneally (i.p.) at week 0 with 20 g of recombinant borrelial protein, or phosphate-buffered saline (PBS), emulsified with complete Freund's adjuvant (CFA), given a similar booster immunization in incomplete Freund's adjuvant (IFA) at week 4, and challenged at week 6. For challenge B. burgdorferi are diluted in BSKII from exponentially-growing cultures and mice are injected subcutaneously (s.c.) at the base of the tail with 0.1 ml of these dilutions (typically 10³-10⁴ borreliae; approximately 10-100 times the median infectious dose). Borreliae used for challenge are passaged fewer than six times in vitro. To assess infection, mice are sacrificed at 14-17 days post-challenge, and specimens derived from ear, bladder, and tibiotarsal joints are placed in BSKII plus 1.4% gelatin, 13 g/ml amphotericin B, 1.5 g/ml phosphomycin, and 15 g/ml rifampicin, and borrelia outgrowth at two or three weeks is quantified by darkfield microscopy. Batches of BSKII are qualified for infection testing by confirming that they supported the growth of 1-5 cells of isolate B31. In some instances seroconversion for protein P39 reactivity is also used to confirm infections (see below). Others have previously shown that mice elicited antibodies to P39 when inoculated with live borreliae by syringe or tick bite, but not with killed borreliae (Simpson, W. J., et al., J. Clin. Microbiol. 29: 236-243 (1991)).

[0264] 6(b). Immunoassays

[0265] Several immunoassay formats are used to quantify levels of borrelia-specific antibodies (ELISA and immunoblot), and to evaluate the functional properties of these antibodies (growth inhibition assay). The ELISA and immunoblot assays are also used to detect and quantify antibodies elicited in response to borrelial infection that react with specific borrelial antigens. Where antibodies to certain borrelial antigens are elicited by infection this is taken as evidence that the borrelial proteins in question are expressed in vivo. Absence of infection-derived antibodies (seroconversion) following borrelial challenge is evidence that infection is prevented or suppressed. The immunoblot assay is also used to ascertain whether antibodies raised against recombinant borrelial antigens recognize a protein of similar size in extracts of whole borreliae. Where the natural protein is of similar, or identical, size in the immunoblot assay to the recombinant version of the same protein, this is taken as evidence that the recombinant protein is the product of a full-length clone of the respective gene.

[0266] Enzyme-Linked Immunosorbant Assay (ELISA). The ELISA is used to quantify levels of antibodies reactive with borrelial antigens elicited in response to immunization with these borrelial antigens. Wells of 96 well microtiter plates (Immunlon 4, Dynatech, Chantilly, Va., or equivalent) are coated with antigen by incubating 50 l of 1 g/ml protein antigen solution in a suitable buffer, typically 0.1 M sodium carbonate buffer at pH 9.6. After decanting unbound antigen, additional binding sites are blocked by incubating 100 l of 3% nonfat milk in wash buffer (PBS, 0.2% Tween 20, pH 7.4). After washing, duplicate serial two-fold dilutions of sera in PBS, Tween 20, 1% fetal bovine serum, are incubated for 1 hr, removed, wells are washed three times, and incubated with horseradish peroxidase-conjugated goat anti-mouse IgG. After three washes, bound antibodies are detected with H₂O₂ and 2,2′-azino-di-(3-ethylbenzthiazoline sulfonate) (Schwan, T. G., et al., Proc. Natl. Acad. Sci. USA 92: 2909-2913 (1985)) (ABTS®, Kirkegaard & Perry Labs., Gaithersburg, Md.) and A₄₀₅ is quantified with a Molecular Devices, Corp. (Menlo Park, Calif.) Vmax™ plate reader. IgG levels twice the background level in serum from naive mice are assigned the minimum titer of 1:100.

[0267] 6(c). In Vitro Growth Inhibition Assay

[0268] Unlike other bacteria, borreliae can be killed by the binding of specific antibodies to their surface antigens. The mechanism for this in vitro killing or growth-inhibitory effect is not known, but can occur in the absence of serum complement, or other immune effector functions. Antibodies elicited in animals receiving immunizations with specific borrelial antigens that result in protection from borrelial challenge usually will directly kill borreliae in vitro. Thus, the in vitro growth inhibition assay also has a high predictive value for the protective potency of the borrelial antibodies, although exceptions, such as antibodies against OspC which are weak at in vitro growth inhibition, have been observed. Also, this assay can be used to evaluate the serologic conservation of epitope binding protective antibodies. A microwell antibody titration assay (Sadziene, A., et al., J. Infect. Dis. 167: 165-172 (1993)) is used to evaluate the growth inhibition (GI) properties of antisera against recombinant borrelial antigens against the homologous B31 isolate, and against various strains of borrelia. Briefly, 10⁵ borrelia in 100 l BSKII are added to serial two-fold dilutions of sera in 100 l BSKII in 96-well plates, and the plates are covered and incubated at 34° C. in a 5% O₂/5% CO₂/90% N₂ gas mixture for 72 h prior to quantification of borrelia growth by darkfield microscopy.

[0269] 6(d). Sodiumdodecylsulfate-Polyacrylamide Gel Electrophoresis (SDS-PAGE) and Immunoblotting

[0270] Using a single well format, total borrelial protein extracts, recombinant borrelial antigen, or recombinant P39 samples (2 g of purified protein, or more for total borrelial extracts) are boiled in SDS/2-ME sample buffer before electrophoresis through 3% acrylamide stacking gels, and resolving gels of higher acrylamide concentration, typically 10-15% acrylamide monomer. Gels are electro-blotted to nitrocellulose membranes and lanes are probed with dilutions of antibody to be tested for reactivity with specific borrelial antigens, followed by the appropriate secondary antibody-enzyme (horseradish peroxidase) conjugate. When it is desirable to confirm that the protein had transferred following electro-blotting, membranes are stained with Ponceau S. Immunoblot signals from bound antibodies are detected on x-ray film as chemiluminescence using ECL™ reagents (Amersham Corp., Arlington Heights, Ill.).

[0271] 6(e). Detection of Borrelia mRNA Expression

[0272] Northern blot analysis is carried out using methods described by, among others, Sambrook et al., supra. to detect the expression of the B. burgdorferi nucleotide sequences of the present invention in animal tissues. A cDNA probe containing an entire nucleotide sequence shown in Table 1 is labeled with ³²P using the rediprime™ DNA labeling system (Amersham Life Science), according to manufacturer's instructions. After labeling, the probe is purified using a CHROMA SPIN-100™ column (Clontech Laboratories, Inc.), according to manufacturer's protocol number PT1200-1. The purified labeled probe is then used to detect the expression of Borrelia mRNA in an animal tissue sample.

[0273] Animal tissues, such as blood or spinal fluid, are examined with the labeled probe using ExpressHyb™ hybridization solution (Clontech) according to manufacturer's protocol number PT1190-1. Following hybridization and washing, the blots are mounted and exposed to film at −70 C overnight, and films developed according to standard procedures.

[0274] The disclosure of all publications (including patents, patent applications, journal articles, laboratory manuals, books, or other documents) cited herein are hereby incorporated by reference in their entireties.

[0275] The present invention is not to be limited in scope by the specific embodiments described herein, which are intended as single illustrations of individual aspects of the invention. Functionally equivalent methods and components are within the scope of the invention, in addition to those shown and described herein and will become apparent to those skilled in the art from the foregoing description and accompanying drawings. Such modifications are intended to fall within the scope of the appended claims.

TABLE 1
Nucleotide and Amino Acid Sequences.

| | |
|---|---|
| f101.aa | (SEQ ID NO:1) |
| t101.aa | (SEQ ID NO:2) |
| f101.nt | (SEQ ID NO:3) |
| t101.nt | (SEQ ID NO:4) |
| f11.aa | (SEQ ID NO:5) |
| t11.aa | (SEQ ID NO:6) |
| f11.nt | (SEQ ID NO:7) |
| t11.nt | (SEQ ID NO:8) |
| f12.aa | (SEQ ID NO:9) |
| t12.aa | (SEQ ID NO:10) |
| f12.nt | (SEQ ID NO:11) |
| t12.nt | (SEQ ID NO:12) |
| f129.aa | (SEQ ID NO:13) |
| t129.aa | (SEQ ID NO:14) |
| f129.nt | (SEQ ID NO:15) |
| t129.nt | (SEQ ID NO:16) |
| f142.aa | (SEQ ID NO:17) |
| t142.aa | (SEQ ID NO:18) |
| f142.nt | (SEQ ID NO:19) |
| t142.nt | (SEQ ID NO:20) |
| f147.aa | (SEQ ID NO:21) |
| t147.aa | (SEQ ID NO:22) |
| f147.nt | (SEQ ID NO:23) |
| t147.nt | (SEQ ID NO:24) |
| f152.aa | (SEQ ID NO:25) |
| t152.aa | (SEQ ID NO:26) |
| f152.nt | (SEQ ID NO:27) |
| t152.nt | (SEQ ID NO:28) |
| f154.aa | (SEQ ID NO:29) |
| t154.aa | (SEQ ID NO:30) |
| f154.nt | (SEQ ID NO:31) |
| t154.nt | (SEQ ID NO:32) |
| f157.aa | (SEQ ID NO:33) |
| t157.aa | (SEQ ID NO:34) |
| f157.nt | (SEQ ID NO:35) |
| t157.nt | (SEQ ID NO:36) |
| f17.aa | (SEQ ID NO:37) |
| t17.aa | (SEQ ID NO:38) |
| f17.nt | (SEQ ID NO:39) |
| t17.nt | (SEQ ID NO:40) |
| f170.aa | (SEQ ID NO:41) |
| t170.aa | (SEQ ID NO:42) |
| f170.nt | (SEQ ID NO:43) |
| t170.nt | (SEQ ID NO:44) |
| f186.aa | (SEQ ID NO:45) |
| t186.aa | (SEQ ID NO:46) |
| f186.nt | (SEQ ID NO:47) |
| t186.nt | (SEQ ID NO:48) |
| f196.aa | (SEQ ID NO:49) |
| t196.aa | (SEQ ID NO:50) |
| f196.nt | (SEQ ID NO:51) |
| t196.nt | (SEQ ID NO:52) |
| f899.aa | (SEQ ID NO:53) |
| t899.aa | (SEQ ID NO:54) |
| f899.nt | (SEQ ID NO:55) |
| t899.nt | (SEQ ID NO:56) |
| f924.aa | (SEQ ID NO:57) |
| t924.aa | (SEQ ID NO:58) |
| f924.nt | (SEQ ID NO:59) |
| t924.nt | (SEQ ID NO:60) |
| f925.aa | (SEQ ID NO:61) |
| t925.aa | (SEQ ID NO:62) |
| f925.nt | (SEQ ID NO:63) |
| t925.nt | (SEQ ID NO:64) |
| f929.aa | (SEQ ID NO:65) |
| t929.aa | (SEQ ID NO:66) |
| f929.nt | (SEQ ID NO:67) |
| t929.nt | (SEQ ID NO:68) |
| f933.aa | (SEQ ID NO:69) |
| t933.aa | (SEQ ID NO:70) |
| f933.nt | (SEQ ID NO:71) |
| t933.nt | (SEQ ID NO:72) |
| f940.aa | (SEQ ID NO:73) |
| t940.aa | (SEQ ID NO:74) |
| f940.nt | (SEQ ID NO:75) |
| t940.nt | (SEQ ID NO:76) |
| f943.aa | (SEQ ID NO:77) |
| t943.aa | (SEQ ID NO:78) |
| f943.nt | (SEQ ID NO:79) |
| t943.nt | (SEQ ID NO:80) |
| f952.aa | (SEQ ID NO:81) |
| t952.aa | (SEQ ID NO:82) |
| f952.nt | (SEQ ID NO:83) |
| t952.nt | (SEQ ID NO:84) |
| f378.aa | (SEQ ID NO:85) |
| t378.aa | (SEQ ID NO:86) |
| f378.nt | (SEQ ID NO:87) |
| t378.nt | (SEQ ID NO:88) |
| f4.aa | (SEQ ID NO:89) |
| t4.aa | (SEQ ID NO:90) |
| f4.nt | (SEQ ID NO:91) |
| t4.nt | (SEQ ID NO:92) |
| f43.aa | (SEQ ID NO:93) |
| t43.aa | (SEQ ID NO:94) |
| f43.nt | (SEQ ID NO:95) |
| t43.nt | (SEQ ID NO:96) |
| f50.aa | (SEQ ID NO:97) |
| t50.aa | (SEQ ID NO:98) |
| f50.nt | (SEQ ID NO:99) |
| t50.nt | (SEQ ID NO:100) |
| f65.aa | (SEQ ID NO:101) |
| t65.aa | (SEQ ID NO:102) |
| f65.nt | (SEQ ID NO:103) |
| t65.nt | (SEQ ID NO:104) |
| f8.aa | (SEQ ID NO:105) |
| t8.aa | (SEQ ID NO:106) |
| f8.nt | (SEQ ID NO:107) |
| t8.nt | (SEQ ID NO:108) |
| f82.aa | (SEQ ID NO:109) |
| t82.aa | (SEQ ID NO:110) |
| f82.nt | (SEQ ID NO:111) |
| f82.nt | (SEQ ID NO:112) |
| f86.aa | (SEQ ID NO:113) |
| t86.aa | (SEQ ID NO:114) |
| f86.nt | (SEQ ID NO:115) |
| t86.nt | (SEQ ID NO:116) |
| f90.aa | (SEQ ID NO:117) |
| t90.aa | (SEQ ID NO:118) |
| f90.nt | (SEQ ID NO:119) |
| t90.nt | (SEQ ID NO:120) |
| f469.aa | (SEQ ID NO:121) |
| t469.aa | (SEQ ID NO:122) |
| f469.nt | (SEQ ID NO:123) |
| t469.nt | (SEQ ID NO:124) |
| f477.aa | (SEQ ID NO:125) |
| t477.aa | (SEQ ID NO:126) |
| f477.nt | (SEQ ID NO:127) |
| t477.nt | (SEQ ID NO:128) |
| f488.aa | (SEQ ID NO:129) |
| t488.aa | (SEQ ID NO:130) |
| f488.nt | (SEQ ID NO:131) |
| t488.nt | (SEQ ID NO:132) |
| f494.aa | (SEQ ID NO:133) |
| t494.aa | (SEQ ID NO:134) |
| f494.nt | (SEQ ID NO:135) |
| t494.nt | (SEQ ID NO:136) |
| f516.aa | (SEQ ID NO:137) |
| t516.aa | (SEQ ID NO:138) |
| f516.nt | (SEQ ID NO:139) |
| t516.nt | (SEQ ID NO:140) |
| f517.aa | (SEQ ID NO:141) |
| t517.aa | (SEQ ID NO:142) |
| f517.nt | (SEQ ID NO:143) |
| t517.nt | (SEQ ID NO:144) |
| f519.aa | (SEQ ID NO:145) |
| t519.aa | (SEQ ID NO:146) |
| f519.nt | (SEQ ID NO:147) |
| t519.nt | (SEQ ID NO:148) |
| f520.aa | (SEQ ID NO:149) |
| t520.aa | (SEQ ID NO:150) |
| f520.nt | (SEQ ID NO:151) |
| t520.nt | (SEQ ID NO:152) |
| f523.aa | (SEQ ID NO:153) |
| t523.aa | (SEQ ID NO:154) |
| f523.nt | (SEQ ID NO:155) |
| f523.nt | (SEQ ID NO:156) |
| f526.aa | (SEQ ID NO:157) |
| t526.aa | (SEQ ID NO:158) |
| f526.nt | (SEQ ID NO:159) |
| t526.nt | (SEQ ID NO:160) |
| f544.aa | (SEQ ID NO:161) |
| t544.aa | (SEQ ID NO:162) |
| f544.nt | (SEQ ID NO:163) |
| t544.nt | (SEQ ID NO:164) |
| f545.aa | (SEQ ID NO:165) |
| t545.aa | (SEQ ID NO:166) |
| f545.nt | (SEQ ID NO:167) |
| t545.nt | (SEQ ID NO:168) |
| f577.aa | (SEQ ID NO:169) |
| t577.aa | (SEQ ID NO:170) |
| f577.nt | (SEQ ID NO:171) |
| t577.nt | (SEQ ID NO:172) |
| f584.aa | (SEQ ID NO:173) |
| t584.aa | (SEQ ID NO:174) |
| f584.nt | (SEQ ID NO:175) |
| t584.nt | (SEQ ID NO:176) |
| f596.aa | (SEQ ID NO:177) |
| t596.aa | (SEQ ID NO:178) |
| f596.nt | (SEQ ID NO:179) |
| t596.nt | (SEQ ID NO:180) |
| f598.aa | (SEQ ID NO:181) |
| t598.aa | (SEQ ID NO:182) |
| f598.nt | (SEQ ID NO:183) |
| t598.nt | (SEQ ID NO:184) |
| f600.aa | (SEQ ID NO:185) |
| t600.aa | (SEQ ID NO:186) |
| f600.nt | (SEQ ID NO:187) |
| t600.nt | (SEQ ID NO:188) |
| f603.aa | (SEQ ID NO:189) |
| t603.aa | (SEQ ID NO:190) |
| f603.nt | (SEQ ID NO:191) |
| t603.nt | (SEQ ID NO:192) |
| f607.aa | (SEQ ID NO:193) |
| t607.aa | (SEQ ID NO:194) |
| f607.nt | (SEQ ID NO:195) |
| t607.nt | (SEQ ID NO:196) |
| f611.aa | (SEQ ID NO:197) |
| t611.aa | (SEQ ID NO:198) |
| f611.nt | (SEQ ID NO:199) |
| t611.nt | (SEQ ID NO:200) |
| f617.aa | (SEQ ID NO:201) |
| t617.aa | (SEQ ID NO:202) |
| f617.nt | (SEQ ID NO:203) |
| t617.nt | (SEQ ID NO:204) |
| f631.aa | (SEQ ID NO:205) |
| t631.aa | (SEQ ID NO:206) |
| f631.nt | (SEQ ID NO:207) |
| t631.nt | (SEQ ID NO:208) |
| f647.aa | (SEQ ID NO:209) |
| t647.aa | (SEQ ID NO:210) |
| f647.nt | (SEQ ID NO:211) |
| t647.nt | (SEQ ID NO:212) |
| f653.aa | (SEQ ID NO:213) |
| t653.aa | (SEQ ID NO:214) |
| f653.nt | (SEQ ID NO:215) |
| t653.nt | (SEQ ID NO:216) |
| f664.aa | (SEQ ID NO:217) |
| t664.aa | (SEQ ID NO:218) |
| f664.nt | (SEQ ID NO:219) |
| t664.nt | (SEQ ID NO:220) |
| f680.aa | (SEQ ID NO:221) |
| t680.aa | (SEQ ID NO:222) |
| f680.nt | (SEQ ID NO:223) |
| t680.nt | (SEQ ID NO:224) |
| f688.aa | (SEQ ID NO:225) |
| t688.aa | (SEQ ID NO:226) |
| f688.nt | (SEQ ID NO:227) |
| t688.nt | (SEQ ID NO:228) |
| f704.aa | (SEQ ID NO:229) |
| t704.aa | (SEQ ID NO:230) |
| f704.nt | (SEQ ID NO:231) |
| t704.nt | (SEQ ID NO:232) |
| f707.aa | (SEQ ID NO:233) |
| t707.aa | (SEQ ID NO:234) |
| f707.nt | (SEQ ID NO:235) |
| t707.nt | (SEQ ID NO:236) |
| f709.aa | (SEQ ID NO:237) |
| t709.aa | (SEQ ID NO:238) |
| f709.nt | (SEQ ID NO:239) |
| t709.nt | (SEQ ID NO:240) |
| f730.aa | (SEQ ID NO:241) |
| t730.aa | (SEQ ID NO:242) |
| f730.nt | (SEQ ID NO:243) |
| t730.nt | (SEQ ID NO:244) |
| f197.aa | (SEQ ID NO:245) |
| t197.aa | (SEQ ID NO:246) |
| f197.nt | (SEQ ID NO:247) |
| t197.nt | (SEQ ID NO:248) |
| f200.aa | (SEQ ID NO:249) |
| t200.aa | (SEQ ID NO:250) |
| f200.nt | (SEQ ID NO:251) |
| t200.nt | (SEQ ID NO:252) |
| f208.aa | (SEQ ID NO:253) |
| t208.aa | (SEQ ID NO:254) |
| f208.nt | (SEQ ID NO:255) |
| t208.nt | (SEQ ID NO:256) |
| f210.aa | (SEQ ID NO:257) |
| t210.aa | (SEQ ID NO:258) |
| f210.nt | (SEQ ID NO:259) |
| t210.nt | (SEQ ID NO:260) |
| f22.aa | (SEQ ID NO:261) |
| t22.aa | (SEQ ID NO:262) |
| f22.nt | (SEQ ID NO:263) |
| t22.nt | (SEQ ID NO:264) |
| f221.aa | (SEQ ID NO:265) |
| t221.aa | (SEQ ID NO:266) |
| f221.nt | (SEQ ID NO:267) |
| t221.nt | (SEQ ID NO:268) |
| f253.aa | (SEQ ID NO:269) |
| t253.aa | (SEQ ID NO:270) |
| f253.nt | (SEQ ID NO:271) |
| t253.nt | (SEQ ID NO:272) |
| f265.aa | (SEQ ID NO:273) |
| t265.aa | (SEQ ID NO:274) |
| f265.nt | (SEQ ID NO:275) |
| t265.nt | (SEQ ID NO:276) |
| f269.aa | (SEQ ID NO:277) |
| t269.aa | (SEQ ID NO:278) |
| f269.nt | (SEQ ID NO:279) |
| t269.nt | (SEQ ID NO:280) |
| f29.aa | (SEQ ID NO:281) |
| t29.aa | (SEQ ID NO:282) |
| f29.nt | (SEQ ID NO:283) |
| t29.nt | (SEQ ID NO:284) |
| f290.aa | (SEQ ID NO:285) |
| t290.aa | (SEQ ID NO:286) |
| f290.nt | (SEQ ID NO:287) |
| t290.nt | (SEQ ID NO:288) |
| f291.aa | (SEQ ID NO:289) |
| t291.aa | (SEQ ID NO:290) |
| f291.nt | (SEQ ID NO:291) |
| t291.nt | (SEQ ID NO:292) |
| f296.aa | (SEQ ID NO:293) |
| t296.aa | (SEQ ID NO:294) |
| f296.nt | (SEQ ID NO:295) |
| t296.nt | (SEQ ID NO:296) |
| f3.aa | (SEQ ID NO:297) |
| t3.aa | (SEQ ID NO:298) |
| f3.nt | (SEQ ID NO:299) |
| t3.nt | (SEQ ID NO:300) |
| f30.aa | (SEQ ID NO:301) |
| t30.aa | (SEQ ID NO:302) |
| f30.nt | (SEQ ID NO:303) |
| t30.nt | (SEQ ID NO:304) |
| f308.aa | (SEQ ID NO:305) |
| t308.aa | (SEQ ID NO:306) |
| f308.nt | (SEQ ID NO:307) |
| t308.nt | (SEQ ID NO:308) |
| f31.aa | (SEQ ID NO:309) |
| t31.aa | (SEQ ID NO:310) |
| f31.nt | (SEQ ID NO:311) |
| t31.nt | (SEQ ID NO:312) |
| f939.aa | (SEQ ID NO:313) |
| f939.aa | (SEQ ID NO:314) |
| f939.nt | (SEQ ID NO:315) |
| t939.nt | (SEQ ID NO:316) |
| f739.aa | (SEQ ID NO:317) |
| t739.aa | (SEQ ID NO:318) |
| f739.nt | (SEQ ID NO:319) |
| t739.nt | (SEQ ID NO:320) |
| f742.aa | (SEQ ID NO:321) |
| t742.aa | (SEQ ID NO:322) |
| f742.nt | (SEQ ID NO:323) |
| t742.nt | (SEQ ID NO:324) |
| f743.aa | (SEQ ID NO:325) |
| t743.aa | (SEQ ID NO:326) |
| f743.nt | (SEQ ID NO:327) |
| t743.nt | (SEQ ID NO:328) |
| f748.aa | (SEQ ID NO:329) |
| t748.aa | (SEQ ID NO:330) |
| t748.nt | (SEQ ID NO:331) |
| t748.nt | (SEQ ID NO:332) |
| t764.aa | (SEQ ID NO:333) |
| f764.aa | (SEQ ID NO:334) |
| f764.nt | (SEQ ID NO:335) |
| t764.nt | (SEQ ID NO:336) |
| f770.aa | (SEQ ID NO:337) |
| t770.aa | (SEQ ID NO:338) |
| f770.nt | (SEQ ID NO:339) |
| t770.nt | (SEQ ID NO:340) |
| f790.aa | (SEQ ID NO:341) |
| t790.aa | (SEQ ID NO:342) |
| f790.nt | (SEQ ID NO:343) |
| t790.nt | (SEQ ID NO:344) |
| f792.aa | (SEQ ID NO:345) |
| t792.aa | (SEQ ID NO:346) |
| f792.nt | (SEQ ID NO:347) |
| t792.nt | (SEQ ID NO:348) |
| f797.aa | (SEQ ID NO:349) |
| t797.aa | (SEQ ID NO:350) |
| f797.nt | (SEQ ID NO:351) |
| t797.nt | (SEQ ID NO:352) |
| f799.aa | (SEQ ID NO:353) |
| t799.aa | (SEQ ID NO:354) |
| f799.nt | (SEQ ID NO:355) |
| t799.nt | (SEQ ID NO:356) |
| f800.aa | (SEQ ID NO:357) |
| t800.aa | (SEQ ID NO:358) |
| f800.nt | (SEQ ID NO:359) |
| t800.nt | (SEQ ID NO:360) |
| f810.aa | (SEQ ID NO:361) |
| t810.aa | (SEQ ID NO:362) |
| f810.nt | (SEQ ID NO:363) |
| t810.nt | (SEQ ID NO:364) |
| f814.aa | (SEQ ID NO:365) |
| t814.aa | (SEQ ID NO:366) |
| f814.nt | (SEQ ID NO:367) |
| t814.nt | (SEQ ID NO:368) |
| f818.aa | (SEQ ID NO:369) |
| t818.aa | (SEQ ID NO:370) |
| f818.nt | (SEQ ID NO:371) |
| t818.nt | (SEQ ID NO:372) |
| f820.aa | (SEQ ID NO:373) |
| t820.aa | (SEQ ID NO:374) |
| f820.nt | (SEQ ID NO:375) |
| t820.nt | (SEQ ID NO:376) |
| f831.aa | (SEQ ID NO:377) |
| t831.aa | (SEQ ID NO:378) |
| f831.nt | (SEQ ID NO:379) |
| t831.nt | (SEQ ID NO:380) |
| f843.aa | (SEQ ID NO:381) |
| t843.aa | (SEQ ID NO:382) |
| f843.nt | (SEQ ID NO:383) |
| t843.nt | (SEQ ID NO:384) |
| f850.aa | (SEQ ID NO:385) |
| t850.aa | (SEQ ID NO:386) |
| f850.nt | (SEQ ID NO:387) |
| t850.nt | (SEQ ID NO:388) |
| f853.aa | (SEQ ID NO:389) |
| t853.aa | (SEQ ID NO:390) |
| f853.nt | (SEQ ID NO:391) |
| t853.nt | (SEQ ID NO:392) |
| f859.aa | (SEQ ID NO:393) |
| t859.aa | (SEQ ID NO:394) |
| f859.nt | (SEQ ID NO:395) |
| t859.nt | (SEQ ID NO:396) |
| f861.aa | (SEQ ID NO:397) |
| t861.aa | (SEQ ID NO:398) |
| f861.nt | (SEQ ID NO:399) |
| t861.nt | (SEQ ID NO:400) |
| f363.aa | (SEQ ID NO:401) |
| t363.aa | (SEQ ID NO:402) |
| f363.nt | (SEQ ID NO:403) |
| t363.nt | (SEQ ID NO:404) |
| f368.aa | (SEQ ID NO:405) |
| t368.aa | (SEQ ID NO:406) |
| f368.nt | (SEQ ID NO:407) |
| t368.nt | (SEQ ID NO:408) |
| f371.aa | (SEQ ID NO:409) |
| t371.aa | (SEQ ID NO:410) |
| f371.nt | (SEQ ID NO:411) |
| t371.nt | (SEQ ID NO:412) |
| f502.aa | (SEQ ID NO:413) |
| t502.aa | (SEQ ID NO:414) |
| f502.nt | (SEQ ID NO:415) |
| t502.nt | (SEQ ID NO:416) |
| f527.aa | (SEQ ID NO:417) |
| t527.aa | (SEQ ID NO:418) |
| f527.nt | (SEQ ID NO:419) |
| t527.nt | (SEQ ID NO:420) |
| f541.aa | (SEQ ID NO:421) |
| t541.aa | (SEQ ID NO:422) |
| f541.nt | (SEQ ID NO:423) |
| t541.nt | (SEQ ID NO:424) |
| f561.aa | (SEQ ID NO:425) |
| t561.aa | (SEQ ID NO:426) |
| f561.nt | (SEQ ID NO:427) |
| t561.nt | (SEQ ID NO:428) |
| f604.aa | (SEQ ID NO:429) |
| t604.aa | (SEQ ID NO:430) |
| f604.nt | (SEQ ID NO:431) |
| t604.nt | (SEQ ID NO:432) |
| f736.aa | (SEQ ID NO:433) |
| t736.aa | (SEQ ID NO:434) |
| f736.nt | (SEQ ID NO:435) |
| t736.nt | (SEQ ID NO:436) |
| f752.aa | (SEQ ID NO:437) |
| t752.aa | (SEQ ID NO:438) |
| f752.nt | (SEQ ID NO:439) |
| t752.nt | (SEQ ID NO:440) |
| f798.aa | (SEQ ID NO:441) |
| t798.aa | (SEQ ID NO:442) |
| t798.nt | (SEQ ID NO:443) |
| t798.nt | (SEQ ID NO:444) |
| f805.aa | (SEQ ID NO:445) |
| t805.aa | (SEQ ID NO:446) |
| f805.nt | (SEQ ID NO:447) |
| t805.nt | (SEQ ID NO:448) |
| f635.aa | (SEQ ID NO:449) |
| t635.aa | (SEQ ID NO:450) |
| f635.nt | (SEQ ID NO:451) |
| t635.nt | (SEQ ID NO:452) |
| f314.aa | (SEQ ID NO:453) |
| t314.aa | (SEQ ID NO:454) |
| f314.nt | (SEQ ID NO:455) |
| t314.nt | (SEQ ID NO:456) |
| f32.aa | (SEQ ID NO:457) |
| t32.aa | (SEQ ID NO:458) |
| f32.nt | (SEQ ID NO:459) |
| t32.nt | (SEQ ID NO:460) |
| f320.aa | (SEQ ID NO:461) |
| t320.aa | (SEQ ID NO:462) |
| f320.nt | (SEQ ID NO:463) |
| t320.nt | (SEQ ID NO:464) |
| f342.aa | (SEQ ID NO:465) |
| t342.aa | (SEQ ID NO:466) |
| f342.nt | (SEQ ID NO:467) |
| t342.nt | (SEQ ID NO:468) |
| f352.aa | (SEQ ID NO:469) |
| t352.aa | (SEQ ID NO:470) |
| t352.nt | (SEQ ID NO:471) |
| t352.nt | (SEQ ID NO:472) |
| f301.aa | (SEQ ID NO:473) |
| t301.aa | (SEQ ID NO:474) |
| f301.nt | (SEQ ID NO:475) |
| t301.nt | (SEQ ID NO:476) |
| f346.aa | (SEQ ID NO:477) |
| t346.aa | (SEQ ID NO:478) |
| f346.nt | (SEQ ID NO:479) |
| t346.nt | (SEQ ID NO:480) |
| f373.aa | (SEQ ID NO:481) |
| t373.aa | (SEQ ID NO:482) |
| f373.nt | (SEQ ID NO:483) |
| t373.nt | (SEQ ID NO:484) |
| f384.aa | (SEQ ID NO:485) |
| t384.aa | (SEQ ID NO:486) |
| f384.nt | (SEQ ID NO:487) |
| t384.nt | (SEQ ID NO:488) |
| f860.aa | (SEQ ID NO:489) |
| t860.aa | (SEQ ID NO:490) |
| f860.nt | (SEQ ID NO:491) |
| t860.nt | (SEQ ID NO:492) |
| f446.aa | (SEQ ID NO:493) |
| t446.aa | (SEQ ID NO:494) |
| f446.nt | (SEQ ID NO:495) |
| t446.nt | (SEQ ID NO:496) |
| f457.aa | (SEQ ID NO:497) |
| t457.aa | (SEQ ID NO:498) |
| f457.nt | (SEQ ID NO:499) |
| t457.nt | (SEQ ID NO:500) |
| f542.aa | (SEQ ID NO:501) |
| t542.aa | (SEQ ID NO:502) |
| f542.nt | (SEQ ID NO:503) |
| t542.nt | (SEQ ID NO:504) |
| f93.aa | (SEQ ID NO:505) |
| t93.aa | (SEQ ID NO:506) |
| f93.nt | (SEQ ID NO:507) |
| t93.nt | (SEQ ID NO:508) |
| f105.aa | (SEQ ID NO:509) |
| t105.aa | (SEQ ID NO:510) |
| f105.nt | (SEQ ID NO:511) |
| t105.nt | (SEQ ID NO:512) |
| f150.aa | (SEQ ID NO:513) |
| t150.aa | (SEQ ID NO:514) |
| f150.nt | (SEQ ID NO:515) |
| t150.nt | (SEQ ID NO:516) |
| f219.aa | (SEQ ID NO:517) |
| t219.aa | (SEQ ID NO:518) |
| f219.nt | (SEQ ID NO:519) |
| t219.nt | (SEQ ID NO:520) |
| f229.aa | (SEQ ID NO:521) |
| t229.aa | (SEQ ID NO:522) |
| f229.nt | (SEQ ID NO:523) |
| t229.nt | (SEQ ID NO:524) |
| f22.aa | (SEQ ID NO:525) |
| t22.aa | (SEQ ID NO:526) |
| f22.nt | (SEQ ID NO:527) |
| t22.nt | (SEQ ID NO:528) |
| f32.aa | (SEQ ID NO:529) |
| t32.aa | (SEQ ID NO:530) |
| f32.nt | (SEQ ID NO:531) |
| t32.nt | (SEQ ID NO:532) |
| f186.aa | (SEQ ID NO:533) |
| t186.aa | (SEQ ID NO:534) |
| f186.nt | (SEQ ID NO:535) |
| t186.nt | (SEQ ID NO:536) |
| f216.aa | (SEQ ID NO:537) |
| t216.aa | (SEQ ID NO:538) |
| f216.nt | (SEQ ID NO:539) |
| t216.nt | (SEQ ID NO:540) |
| f328.aa | (SEQ ID NO:541) |
| t328.aa | (SEQ ID NO:542) |
| f328.nt | (SEQ ID NO:543) |
| t328.nt | (SEQ ID NO:544) |
| t352.aa | (SEQ ID NO:545) |
| t352.aa | (SEQ ID NO:546) |
| f352.nt | (SEQ ID NO:547) |
| t352.nt | (SEQ ID NO:548) |
| f867.aa | (SEQ ID NO:549) |
| t867.aa | (SEQ ID NO:550) |
| f867.nt | (SEQ ID NO:551) |
| t867.nt | (SEQ ID NO:552) |
| f868.aa | (SEQ ID NO:553) |
| t868.aa | (SEQ ID NO:554) |
| f868.nt | (SEQ ID NO:555) |
| t868.nt | (SEQ ID NO:556) |
| f872.aa | (SEQ ID NO:557) |
| t872.aa | (SEQ ID NO:558) |
| f872.nt | (SEQ ID NO:559) |
| t872.nt | (SEQ ID NO:560) |
| f874.aa | (SEQ ID NO:561) |
| t874.aa | (SEQ ID NO:562) |
| f874.nt | (SEQ ID NO:563) |
| t874.nt | (SEQ ID NO:564) |
| f886.aa | (SEQ ID NO:565) |
| t886.aa | (SEQ ID NO:566) |
| f886.nt | (SEQ ID NO:567) |
| t886.nt | (SEQ ID NO:568) |
| f888.aa | (SEQ ID NO:569) |
| t888.aa | (SEQ ID NO:570) |
| f888.nt | (SEQ ID NO:571) |
| t888.nt | (SEQ ID NO:572) |
| f893.aa | (SEQ ID NO:573) |
| t893.aa | (SEQ ID NO:574) |
| f893.nt | (SEQ ID NO:575) |
| t893.nt | (SEQ ID NO:576) |
| f895.aa | (SEQ ID NO:577) |
| t895.aa | (SEQ ID NO:578) |
| f895.nt | (SEQ ID NO:579) |
| t895.nt | (SEQ ID NO:580) |
| f605.aa | (SEQ ID NO:581) |
| t605.aa | (SEQ ID NO:582) |
| f605.nt | (SEQ ID NO:583) |
| t605.nt | (SEQ ID NO:584) |
| f606.aa | (SEQ ID NO:585) |
| t606.aa | (SEQ ID NO:586) |
| f606.nt | (SEQ ID NO:587) |
| t606.nt | (SEQ ID NO:588) |
| f679.aa | (SEQ ID NO:589) |
| t679.aa | (SEQ ID NO:590) |
| f679.nt | (SEQ ID NO:591) |
| t679.nt | (SEQ ID NO:592) |
| f11-12.nt | (SEQ ID NO:593) |
| t11-12.nt | (SEQ ID NO:594) |
| f11-12.aa | (SEQ ID NO:595) |
| t11-12.aa | (SEQ ID NO:596) |
| f11-4.nt | (SEQ ID NO:597) |
| t11-4.nt | (SEQ ID NO:598) |
| f11-4.aa | (SEQ ID NO:599) |
| t11-4.aa | (SEQ ID NO:600) |
| f112-1.nt | (SEQ ID NO:601) |
| t112-1.nt | (SEQ ID NO:602) |
| f112-1.aa | (SEQ ID NO:603) |
| t112-1.aa | (SEQ ID NO:604) |
| f14-8.nt | (SEQ ID NO:605) |
| t14-8.nt | (SEQ ID NO:606) |
| f14-8.aa | (SEQ ID NO:607) |
| t14-8.aa | (SEQ ID NO:608) |
| f17-6.nt | (SEQ ID NO:609) |
| t17-6.nt | (SEQ ID NO:610) |
| f17-6.aa | (SEQ ID NO:611) |
| t17-6.aa | (SEQ ID NO:612) |
| f19-2.nt | (SEQ ID NO:613) |
| t19-2.nt | (SEQ ID NO:614) |
| f19-2.aa | (SEQ ID NO:615) |
| t19-2.aa | (SEQ ID NO:616) |
| f19-4.nt | (SEQ ID NO:617) |
| t19-4.nt | (SEQ ID NO:618) |
| f19-4.aa | (SEQ ID NO:619) |
| t19-4.aa | (SEQ ID NO:620) |
| f19-6.nt | (SEQ ID NO:621) |
| t19-6.nt | (SEQ ID NO:622) |
| f19-6.aa | (SEQ ID NO:623) |
| t19-6.aa | (SEQ ID NO:624) |
| f21-4.nt | (SEQ ID NO:625) |
| t21-4.nt | (SEQ ID NO:626) |
| f21-4.aa | (SEQ ID NO:627) |
| t21-4.aa | (SEQ ID NO:628) |
| f24-1.nt | (SEQ ID NO:629) |
| t24-1.nt | (SEQ ID NO:630) |
| f24-1.aa | (SEQ ID NO:631) |
| t24-1.aa | (SEQ ID NO:632) |
| f28-2.nt | (SEQ ID NO:633) |
| t28-2.nt | (SEQ ID NO:634) |
| f28-2.aa | (SEQ ID NO:635) |
| t28-2.aa | (SEQ ID NO:636) |
| f28-3.nt | (SEQ ID NO:637) |
| t28-3.nt | (SEQ ID NO:638) |
| f28-3.aa | (SEQ ID NO:639) |
| t28-3.aa | (SEQ ID NO:640) |
| f31-2.nt | (SEQ ID NO:641) |
| t31-2.nt | (SEQ ID NO:642) |
| f31-2.aa | (SEQ ID NO:643) |
| t31-2.aa | (SEQ ID NO:644) |
| f32-4.nt | (SEQ ID NO:645) |
| t32-4.nt | (SEQ ID NO:646) |
| f32-4.aa | (SEQ ID NO:647) |
| t32-4.aa | (SEQ ID NO:648) |
| f4-15.nt | (SEQ ID NO:649) |
| t4-15.nt | (SEQ ID NO:650) |
| f4-15.aa | (SEQ ID NO:651) |
| t4-15.aa | (SEQ ID NO:652) |
| f4-50.nt | (SEQ ID NO:653) |
| t4-50.nt | (SEQ ID NO:654) |
| f4-50.aa | (SEQ ID NO:655) |
| t4-50.aa | (SEQ ID NO:656) |
| f4-66.nt | (SEQ ID NO:657) |
| t4-66.nt | (SEQ ID NO:658) |
| f4-66.aa | (SEQ ID NO:659) |
| t4-66.aa | (SEQ ID NO:660) |
| f42-1.nt | (SEQ ID NO:661) |
| t42-1.nt | (SEQ ID NO:662) |
| f42-1.aa | (SEQ ID NO:663) |
| t42-1.aa | (SEQ ID NO:664) |
| f43-3.nt | (SEQ ID NO:665) |
| t43-3.nt | (SEQ ID NO:666) |
| f43-3.aa | (SEQ ID NO:667) |
| t43-3.aa | (SEQ ID NO:668) |
| f45-2.nt | (SEQ ID NO:669) |
| t45-2.nt | (SEQ ID NO:670) |
| f45-2.aa | (SEQ ID NO:671) |
| t45-2.aa | (SEQ ID NO:672) |
| f47-2.nt | (SEQ ID NO:673) |
| t47-2.nt | (SEQ ID NO:674) |
| f47-2.aa | (SEQ ID NO:675) |
| t47-2.aa | (SEQ ID NO:676) |
| f49-2.nt | (SEQ ID NO:677) |
| t49-2.nt | (SEQ ID NO:678) |
| f49-2.aa | (SEQ ID NO:679) |
| t49-2.aa | (SEQ ID NO:680) |
| f5-14.nt | (SEQ ID NO:681) |
| t5-14.nt | (SEQ ID NO:682) |
| f5-14.aa | (SEQ ID NO:683) |
| t5-14.aa | (SEQ ID NO:684) |
| f5-15.nt | (SEQ ID NO:685) |
| t5-15.nt | (SEQ ID NO:686) |
| f5-15.aa | (SEQ ID NO:687) |
| t5-15.aa | (SEQ ID NO:688) |
| f51-2.nt | (SEQ ID NO:689) |
| t51-2.nt | (SEQ ID NO:690) |
| f51-2.aa | (SEQ ID NO:691) |
| t51-2.aa | (SEQ ID NO:692) |
| f6-21.nt | (SEQ ID NO:693) |
| t6-21.nt | (SEQ ID NO:694) |
| f6-21.aa | (SEQ ID NO:695) |
| t6-21.aa | (SEQ ID NO:696) |
| f6-27.nt | (SEQ ID NO:697) |
| t6-27.nt | (SEQ ID NO:698) |
| f6-27.aa | (SEQ ID NO:699) |
| t6-27.aa | (SEQ ID NO:700) |
| f6-5.nt | (SEQ ID NO:701) |
| t6-5.nt | (SEQ ID NO:702) |
| f6-5.aa | (SEQ ID NO:703) |
| t6-5.aa | (SEQ ID NO:704) |
| f7-30.nt | (SEQ ID NO:705) |
| t7-30.nt | (SEQ ID NO:706) |
| f7-30.aa | (SEQ ID NO:707) |
| t7-30.aa | (SEQ ID NO:708) |
| f76-1.nt | (SEQ ID NO:709) |
| t76-1.nt | (SEQ ID NO:710) |
| f76-1.aa | (SEQ ID NO:711) |
| t76-1.aa | (SEQ ID NO:712) |
| f8-10.nt | (SEQ ID NO:713) |
| t8-10.nt | (SEQ ID NO:714) |
| f8-10.aa | (SEQ ID NO:715) |
| t8-10.aa | (SEQ ID NO:716) |
| f8-14.nt | (SEQ ID NO:717) |
| t8-14.nt | (SEQ ID NO:718) |
| f8-14.aa | (SEQ ID NO:719) |
| t8-14.aa | (SEQ ID NO:720) |
| f01A.nt BB001 | (SEQ ID NO:721) |
| t01A.nt BB001 | (SEQ ID NO:722) |
| f01A.aa BB001 | (SEQ ID NO:723) |
| t01A.aa BB001 | (SEQ ID NO:724) |
| f02A.nt BB002 | (SEQ ID NO:725) |
| t02A.nt BB002 | (SEQ ID NO:726) |
| f02A.aa BB002 | (SEQ ID NO:727) |
| t02A.aa BB002 | (SEQ ID NO:728) |
| f03A.nt BB006 | (SEQ ID NO:729) |
| t03A.nt BB006 | (SEQ ID NO:730) |
| f03A.aa BB006 | (SEQ ID NO:731) |
| t03A.aa BB006 | (SEQ ID NO:732) |
| f04A.nt BB011 | (SEQ ID NO:733) |
| t04A.nt BB011 | (SEQ ID NO:734) |
| f04A.aa BB011 | (SEQ ID NO:735) |
| t04A.aa BB011 | (SEQ ID NO:736) |
| f05A.nt BB009 | (SEQ ID NO:737) |
| t05A.nt BB009 | (SEQ ID NO:738) |
| f05A.aa BB009 | (SEQ ID NO:739) |
| t05A.aa BB009 | (SEQ ID NO:740) |
| f06A.nt BB014 | (SEQ ID NO:741) |
| t06A.nt BB014 | (SEQ ID NO:742) |
| f06A.aa BB014 | (SEQ ID NO:743) |
| t06A.aa BB014 | (SEQ ID NO:744) |
| f07A.nt BB023 | (SEQ ID NO:745) |
| t07A.nt BB023 | (SEQ ID NO:746) |
| f07A.aa BB023 | (SEQ ID NO:747) |
| t07A.aa BB023 | (SEQ ID NO:748) |
| f08A.nt BB024 | (SEQ ID NO:749) |
| t08A.nt BB024 | (SEQ ID NO:750) |
| f08A.aa BB024 | (SEQ ID NO:751) |
| t08A.aa BB024 | (SEQ ID NO:752) |
| f09A.nt BB025 | (SEQ ID NO:753) |
| t09A.nt BB025 | (SEQ ID NO:754) |
| t09A.aa BB025 | (SEQ ID NO:755) |
| t09A.aa BB025 | (SEQ ID NO:756) |

[0276] TABLE 2
Closest matching sequences between the polypeptides of the present invention
and sequences in GenBank and Derwent databases.

| | GenSeq | | BLAST | BLAST |
|---|---|---|---|---|
| Query | Access No. | GenSeq Gene Description | Score | P-Value |
| f01A.aa | gi\|2690256 | (AE000790) antigen, P35, putative | 1523 | 5.90E−206 |
| | | [Borrelia burgdorferi] | | |
| f02A.aa | gi\|2690286 | (AE000790) B. burgdorferi predicted | 1320 | 2.10E−174 |
| | | coding region BBA69 [Borrelia | | |
| f02A.aa | gi\|2690285 | (AE000790) B. burgdorferi predicted | 278 | 7.50E−71 |
| | | coding region BBA68 [Borrelia | | |
| f02A.aa | gi\|2690105 | (AE000789) B. burgdorferi predicted | 151 | 8.40E−54 |
| | | coding region BBI38 [Borrelia | | |
| f02A.aa | gi\|2690092 | (AE000789) antigen, P35, putative | 151 | 2.70E−48 |
| | | [Borrelia burgdorferi] | | |
| f02A.aa | gi\|2690183 | (AE000787) antigen, P35, putative | 155 | 4.20E−22 |
| | | [Borrelia burgdorferi] | | |
| f02A.aa | gi\|2690106 | (AE000789) B. burgdorferi predicted | 154 | 1.30E−21 |
| | | coding region BBI39 [Borrelia | | |
| f03A.aa | gi\|2688051 | (AE001127) antigen, S2, putative | 1223 | 7.60E−164 |
| | | [Borrelia burgdorferi] | | |
| f03A.aa | gi\|1063419 | S2 gene product [Borrelia burgdorferi] | 116 | 3.00E−22 |
| f03A.aa | gi\|2690227 | (AE000790) antigen, S2 [Borrelia | 116 | 9.70E−22 |
| | | burgdorferi] >pir\|D70207\|D70207 | | |
| f03A.aa | gi\|2690128 | (AE000788) protein p23 [Borrelia | 110 | 5.70E−19 |
| | | burgdorferi] >pir\|C70257\|C70257 | | |
| f03A.aa | gi\|2689956 | (AE000785) protein p23 [Borrelia | 104 | 7.90E−15 |
| | | burgdorferi] >pir\|D70225\|D70225 | | |
| f04A.aa | gi\|2690078 | (AE000784) B. burgdorferi predicted | 1873 | 5.60E−250 |
| | | coding region BBH18 [Borrelia | | |
| f04A.aa | gi\|2690192 | (AE000787) B. burgdorferi predicted | 167 | 1.40E−15 |
| | | coding region BBJ13 [Borrelia | | |
| f05A.aa | gi\|2687919 | (AE001117) B. burgdorferi predicted | 696 | 4.20E−92 |
| | | coding region BB0028 [Borrelia | | |
| f06A.aa | gi\|2690129 | (AE000788) outer membrane protein | 884 | 4.80E−124 |
| | | [Borrelia burgdorferi] | | |
| f06A.aa | gi\|2690089 | (AE000789) conserved hypothetical | 731 | 2.20E−118 |
| | | protein [Borrelia burgdorferi] | | |
| f06A.aa | gi\|520783 | unknown [Borrelia burgdorferi] | 337 | 4.30E−58 |
| | | >gi\|551742 unknown [Borrelia | | |
| f07A.aa | gi\|2688608 | (AE001168) flagellar filament outer | 1668 | 2.50E−224 |
| | | layer protein (flaA) [Borrelia | | |
| f07A.aa | gi\|1575447 | FlaA protein [Borrelia burgdorferi] | 1645 | 3.60E−221 |
| | | >gi\|1019754 orf [Borrelia | | |
| f07A.aa | gi\|152896 | flagellar filament surface antigen | 144 | 1.70E−38 |
| | | [Spirochaeta aurantia] | | |
| f07A.aa | gi\|155059 | endoflagellar sheath protein | 139 | 3.80E−28 |
| | | [Treponema pallidum] | | |
| f07A.aa | gi\|433524 | flagellin FlaA1 [Serpulina | 119 | 3.00E−26 |
| | | hyodysenteriae] >gi\|904393 | | |
| | | endoflagellar | | |
| f07A.aa | pir\|A32814\|A32814 | flagellar filament surface antigen - | 116 | 9.40E−11 |
| | | Spirochaeta aurantia | | |
| f08A.aa | gi\|1209837 | lipoprotein [Borrelia burgdorferi] | 508 | 2.10E−78 |
| f08A.aa | gi\|2121280 | (AF000270) lipoprotein [Borrelia | 547 | 4.00E−70 |
| | | burgdorferi] >gi\|3095109 | | |
| f08A.aa | gi\|1209873 | lipoprotein [Borrelia burgdorferi] | 303 | 3.70E−51 |
| f08A.aa | gi\|1209843 | lipoprotein [Borrelia burgdorferi] | 395 | 2.20E−49 |
| f08A.aa | gi\|1209849 | lipoprotein [Borrelia burgdorferi] | 219 | 2.60E−27 |
| f08A.aa | gi\|3095105 | (AF046998) 2.9-8 lipoprotein [Borrelia | 234 | 4.30E−27 |
| | | burgdorferi] | | |
| f08A.aa | gi\|1209831 | lipoprotein [Borrelia burgdorferi] | 209 | 1.10E−22 |
| f08A.aa | gi\|3095107 | (AF046999) 2.9-9 lipoprotein [Borrelia | 200 | 1.80E−22 |
| | | burgdorferi] | | |
| f08A.aa | gi\|1209857 | lipoprotein [Borrelia burgdorferi] | 200 | 2.50E−21 |
| f08A.aa | gnl\|PID\|e268244 | surface-exposed lipoprotein [Borrelia | 142 | 1.80E−11 |
| | | afzelii] | | |
| f09A.aa | gi\|1209843 | lipoprotein [Borrelia burgdorferi] | 453 | 8.60E−67 |
| f09A.aa | gi\|2121280 | (AF000270) lipoprotein [Borrelia | 379 | 1.00E−56 |
| | | burgdorferi] >gi\|3095109 | | |
| f09A.aa | gi\|1209873 | lipoprotein [Borrelia burgdorferi] | 282 | 1.10E−45 |
| f09A.aa | gi\|1209837 | lipoprotein [Borrelia burgdorferi] | 357 | 7.10E−44 |
| f09A.aa | gi\|1209849 | lipoprotein [Borrelia burgdorferi] | 143 | 1.60E−13 |
| f09A.aa | gnl\|PID\|e268244 | surface-exposed lipoprotein [Borrelia | 111 | 3.60E−13 |
| | | afzelii] | | |
| f09A.aa | gi\|3095105 | (AF046998) 2.9-8 lipoprotein [Borrelia | 142 | 5.40E−13 |
| | | burgdorferi] | | |
| f101.aa | gi\|2688708 | (AE001176) conserved hypothetical | 1099 | 4.50E−152 |
| | | protein [Borrelia burgdorferi] | | |
| f105.aa | gi\|2688693 | (AE001175) B. burgdorferi predicted | 1276 | 2.20E−177 |
| | | coding region BB0758 [Borrelia | | |
| f11- | gi\|2690139 | (AE000788) B. burgdorferi predicted | 1473 | 4.70E−193 |
| 12.aa | | coding region BBK01 [Borrelia | | |
| f11- | gi\|2690030 | (AE000786) B. burgdorferi predicted | 1066 | 1.40E−138 |
| 12.aa | | coding region BBG01 [Borrelia | | |
| f11- | gi\|2690074 | (AE000784) B. burgdorferi predicted | 173 | 6.20E−93 |
| 12.aa | | coding region BBH37 [Borrelia | | |
| f11- | gi\|2690188 | (AE000787) B. burgdorferi predicted | 192 | 2.70E−75 |
| 12.aa | | coding region BBJ08 [Borrelia | | |
| f11-4.aa | gi\|2690150 | (AE000788) B. burgdorferi predicted | 1144 | 2.70E−147 |
| | | coding region BBK12 [Borrelia | | |
| f11-4.aa | gi\|2690145 | (AE000788) B. burgdorferi predicted | 852 | 5.70E−127 |
| | | coding region BBK07 [Borrelia | | |
| f11-4.aa | gi\|2690095 | (AE000789) B. burgdorferi predicted | 153 | 1.30E−34 |
| | | coding region BBI10 [Borrelia | | |
| f11-4.aa | gi\|2690197 | (AE000787) B. burgdorferi predicted | 115 | 1.40E−12 |
| | | coding region BBJ31 [Borrelia | | |
| f11-4.aa | gi\|2690219 | (AE000787) B. burgdorferi predicted | 115 | 1.40E−12 |
| | | coding region BBJ45 [Borrelia | | |
| f112- | gi\|2690054 | (AE000784) B. burgdorferi predicted | 573 | 7.00E−75 |
| 1.aa | | coding region BBH06 [Borrelia | | |
| f12.aa | gi\|2688785 | (AE001182) B. burgdorferi predicted | 6008 | 0 |
| | | coding region BB0838 [Borrelia | | |
| f129.aa | gi\|2688685 | (AE001174) B. burgdorferi predicted | 987 | 6.20E−133 |
| | | coding region BB0739 [Borrelia | | |
| f14-8.aa | gi\|2689955 | (AE000785) antigen, P35, putative | 385 | 2.70E−75 |
| | | [Borrelia burgdorferi] | | |
| f14-8.aa | gi\|2690120 | (AE000789) B. burgdorferi predicted | 330 | 2.60E−66 |
| | | coding region BBI34 [Borrelia | | |
| f14-8.aa | gi\|2690052 | (AE000784) antigen, P35, putative | 287 | 4.00E−64 |
| | | [Borrelia burgdorferi] | | |
| f14-8.aa | gi\|2690100 | (AE000789) B. burgdorferi predicted | 172 | 1.10E−38 |
| | | coding region BBI16 [Borrelia | | |
| f14-8.aa | gi\|2690115 | (AE000789) B. burgdorferi predicted | 173 | 1.70E−28 |
| | | coding region BBI28 [Borrelia | | |
| f14-8.aa | gi\|2690116 | (AE000789) B. burgdorferi predicted | 163 | 8.20E−24 |
| | | coding region BBI29 [Borrelia | | |
| f14-8.aa | gi\|2690207 | (AE000787) B. burgdorferi predicted | 220 | 1.90E−23 |
| | | coding region BBJ02 [Borrelia | | |
| f14-8.aa | gi\|2690099 | (AE000789) B. burgdorferi predicted | 140 | 3.60E−12 |
| | | coding region BBI15 [Borrelia | | |
| f14-8.aa | gi\|2690125 | (AE000788) antigen, P35, putative | 111 | 1.00E−11 |
| | | [Borrelia burgdorferi] | | |
| f142.aa | gi\|2688655 | (AE001172) glutamate transporter | 2233 | 7.19999999999982e−311 |
| | | (gltP) [Borrelia burgdorferi] | | |
| f142.aa | gnl\|PID\|e233874 | hypothetical protein [Bacillus subtilis] | 727 | 2.60E−156 |
| | | >gnl\|PID\|e1182902 | | |
| f142.aa | gnl\|PID\|d1016231 | Proton/sodium-glutamate symport | 762 | 6.60E−146 |
| | | protein (Glutamate-aspartate | | |
| f142.aa | gi\|1574711 | proton glutamate symport protein (gltP) | 903 | 2.10E−131 |
| | | [Haemophilus influenzae] | | |
| f142.aa | gi\|2983758 | (AE000735) proton/sodium-glutamate | 111 | 8.40E−36 |
| | | symport protein [Aquifex | | |
| f142.aa | gi\|143000 | proton glutamate symport protein | 125 | 1.20E−30 |
| | | [Bacillus stearothermophilus] | | |
| f142.aa | gi\|143002 | proton glutamate symport protein | 125 | 1.90E−28 |
| | | [Bacillus caldotenax] | | |
| f142.aa | gnl\|PID\|e1183024 | proton/sodium-glutamate symport | 122 | 2.20E−25 |
| | | protein [Bacillus subtilis] | | |
| f142.aa | gnl\|PID\|d1022697 | glutamate transporter [Caenorhabditis | 121 | 1.80E−22 |
| | | elegans] | | |
| f142.aa | gi\|1255318 | coded for by C. elegans cDNA cm08h9; | 121 | 2.10E−22 |
| | | coded for by C. elegans cDNA | | |
| f142.aa | gi\|2388712 | (AF017105) amino acid transporter | 135 | 3.60E−22 |
| | | [Chlamydia psittaci] | | |
| f142.aa | gi\|2655021 | (AF018259) glutamate transporter 5A | 125 | 7.70E−22 |
| | | [Ambystoma tigrinum] | | |
| f142.aa | gnl\|PID\|e149542 | gluT-R gene product [Clostridium | 199 | 4.60E−21 |
| | | perfringens] | | |
| f142.aa | gi\|396412 | gltP [Escherichia coli] >gi\|147160 | 109 | 7.90E−21 |
| | | proton-glutamate [Escherichia | | |
| f147.aa | gi\|2688656 | (AE001172) NADH oxidase, water- | 2245 | 7.20E−303 |
| | | forming (nox) [Borrelia burgdorferi] | | |
| f147.aa | gi\|642030 | NADH oxidase [Serpulina | 318 | 9.20E−105 |
| | | hyodysenteriae] | | |
| f147.aa | gi\|2650234 | (AE001077) NADH oxidase (noxA-2) | 303 | 2.90E−93 |
| | | [Archaeoglobus fulgidus] | | |
| f147.aa | gi\|2792490 | (AF041467) coenzyme A disulfide | 194 | 2.60E−90 |
| | | reductase [Staphylococcus aureus] | | |
| f147.aa | gi\|2650383 | (AE001088) NADH oxidase (noxA-1) | 286 | 3.30E−88 |
| | | [Archaeoglobus fulgidus] | | |
| f147.aa | gnl\|PID\|d1009320 | H2O-forming NADH Oxidase | 369 | 4.30E−85 |
| | | [Streptococcus mutans] | | |
| f147.aa | gi\|49023 | NADH peroxidase [Enterococcus | 638 | 3.20E−83 |
| | | faecalis] >pir\|S18332\|S18332 NADH | | |
| f147.aa | gi\|1591361 | NADH oxidase (nox) [Methanococcus | 535 | 4.80E−83 |
| | | jannaschii] >pir\|A64381\|A64381 | | |
| f147.aa | gi\|2622461 | (AE000898) NADH oxidase | 303 | 8.40E−72 |
| | | [Methanobacterium | | |
| | | thermoautotrophicum] | | |
| f147.aa | gi\|47045 | NADH oxidase [Enterococcus faecalis] | 547 | 8.80E−71 |
| | | >pir\|S26965\|S26965 NADH oxidase | | |
| f147.aa | gi\|2650233 | (AE001077) NADH oxidase (noxA-3) | 312 | 2.00E−63 |
| | | [Archaeoglobus fulgidus] | | |
| f147.aa | gi\|1674132 | (AE000044) Mycoplasma pneumoniae, | 175 | 7.00E−61 |
| | | NADH oxidase; similar to | | |
| f147.aa | gi\|1045969 | NADH oxidase [Mycoplasma | 164 | 4.10E−51 |
| | | genitalium] >pir\|D64230\|D64230 | | |
| | | NADH | | |
| f147.aa | gi\|2648692 | (AE000975) NADH oxidase (noxA-5) | 143 | 2.00E−40 |
| | | [Archaeoglobus fulgidus] | | |
| f147.aa | gi\|2983379 | (AE000709) NADH oxidase [Aquifex | 162 | 5.50E−30 |
| | | aeolicus] | | |
| f150.aa | gi\|2688659 | (AE001172) conserved hypothetical | 1319 | 2.70E−179 |
| | | protein [Borrelia burgdorferi] | | |
| f150.aa | gi\|2983887 | (AE000743) hypothetical protein | 238 | 1.40E−25 |
| | | [Aquifex aeolicus] | | |
| f150.aa | gi\|2581796 | (AF001974) putative TrkA | 175 | 5.80E−23 |
| | | [Thermoanaerobacter ethanolicus] | | |
| f150.aa | gi\|1377829 | unknown [Bacillus subtilis] | 212 | 1.50E−21 |
| | | >gnl\|PID\|d1007628 orf4 [Bacillus | | |
| f150.aa | gnl\|PID\|e1185982 | similar to hypothetical proteins | 181 | 6.00E−17 |
| | | [Bacillus subtilis] | | |
| f150.aa | gnl\|PID\|d1011497 | hypothetical protein [Synechocystis sp.] | 128 | 3.70E−11 |
| | | >pir\|S75999\|S75999 | | |
| f152.aa | gi\|2688660 | (AE001172) K+ transport protein (ntpJ) | 2200 | 2.40000000001213e−313 |
| | | [Borrelia burgdorferi] | | |
| f152.aa | gi\|2983882 | (AE000743) K+ transport protein | 239 | 3.60E−106 |
| | | homolog [Aquifex aeolicus] | | |
| f152.aa | gnl\|PID\|e1184940 | similar to Na+-transporting ATP | 158 | 6.60E−64 |
| | | synthase [Bacillus subtilis] | | |
| f152.aa | gnl\|PID\|e1185983 | similar to Na+-transporting ATP | 131 | 3.40E−62 |
| | | synthase [Bacillus subtilis] | | |
| f152.aa | gnl\|PID\|d1018749 | Na+-ATPase subunit J [Synechocystis | 141 | 1.70E−55 |
| | | sp.] >pir\|S75455\|S75455 | | |
| f152.aa | gnl\|PID\|d1004799 | Na+-ATPase subunit J [Enterococcus | 209 | 4.00E−45 |
| | | hirae] | | |
| f152.aa | gi\|2581795 | (AF001974) putative TrkG | 149 | 2.20E−29 |
| | | [Thermoanaerobacter ethanolicus] | | |
| f152.aa | gi\|1674061 | (AE000036) Mycoplasma pneumoniae, | 104 | 4.00E−28 |
| | | Na(+) translocating ATPase | | |
| f152.aa | gi\|1046024 | Na+ ATPase subunit J [Mycoplasma | 114 | 2.80E−27 |
| | | genitalium] >pir\|F64235\|F64235 Na+ | | |
| f152.aa | gi\|567062 | HKT1 [Triticum aestivum] | 137 | 2.00E−17 |
| | | >pir\|S47582\|S47582 high-affinity | | |
| | | potassium | | |
| f154.aa | gi\|2688664 | (AE001172) B. burgdorferi predicted | 2456 | 0 |
| | | coding region BB0722 [Borrelia | | |
| f157.aa | gi\|2688641 | (AE001171) rod shape-determining | 2300 | 0 |
| | | protein (mreB-2) [Borrelia | | |
| f157.aa | gi\|143657 | endospore forming protein [Bacillus | 224 | 2.60E−61 |
| | | subtilis] | | |
| f157.aa | gi\|580938 | internal open reading frame (AA 1-290) | 224 | 2.60E−61 |
| | | [Bacillus subtilis] | | |
| f157.aa | gi\|2982781 | (AE000670) rod shape determining | 333 | 5.40E−61 |
| | | protein RodA [Aquifex aeolicus] | | |
| f157.aa | gi\|580937 | spoVE gene product (AA 1-366) | 224 | 7.70E−59 |
| | | [Bacillus subtilis] >gnl\|PID\|e1185111 | | |
| f157.aa | gi\|147695 | rod-shape-determining protein | 340 | 6.10E−58 |
| | | [Escherichia coli] >gi\|1778551 | | |
| f157.aa | gnl\|PID\|e328589 | sfr [Streptomyces coelicolor] | 362 | 6.40E−58 |
| f157.aa | gi\|1572976 | rod shape-determining protein (mreB) | 307 | 4.00E−56 |
| | | [Haemophilus influenzae] | | |
| f157.aa | gnl\|PID\|e1185075 | similar to cell-division protein [Bacillus | 203 | 2.60E−45 |
| | | subtilis] | | |
| f157.aa | gi\|1469784 | putative cell division protein ftsW | 231 | 6.90E−45 |
| | | [Enterococcus hirae] | | |
| f157.aa | gi\|1016213 | strong sequence similarity to FtsW, | 206 | 3.00E−41 |
| | | RodA, and SpoV-E [Cyanophora | | |
| f157.aa | gnl\|PID\|d1019002 | rod-shape-determining protein | 184 | 1.60E−38 |
| | | [Synechocystis sp.] | | |
| f157.aa | gi\|146039 | cell division protein [Escherichia coli] | 104 | 8.30E−35 |
| | | >gi\|40857 FtsW protein | | |
| f157.aa | gi\|1574692 | cell division protein (ftsW) | 114 | 3.30E−33 |
| | | [Haemophilus influenzae] | | |
| f157.aa | gi\|1165286 | FtsW [Borrelia burgdorferi] | 170 | 6.20E−32 |
| | | >gi\|2688164 (AE001137) cell division | | |
| f17-6.aa | gi\|2690100 | (AE000789) B. burgdorferi predicted | 1250 | 1.70E−164 |
| | | coding region BBI16 [Borrelia | | |
| f17-6.aa | gi\|2690120 | (AE000789) B. burgdorferi predicted | 142 | 3.40E−59 |
| | | coding region BBI34 [Borrelia | | |
| f17-6.aa | gi\|2690115 | (AE000789) B. burgdorferi predicted | 447 | 6.70E−56 |
| | | coding region BBI28 [Borrelia | | |
| f17-6.aa | gi\|2690052 | (AE000784) antigen, P35, putative | 182 | 1.10E−34 |
| | | [Borrelia burgdorferi] | | |
| f17-6.aa | gi\|2689955 | (AE000785) antigen, P35, putative | 196 | 6.60E−34 |
| | | [Borrelia burgdorferi] | | |
| f17-6.aa | gi\|2690114 | (AE000789) B. burgdorferi predicted | 176 | 1.00E−16 |
| | | coding region BBI27 [Borrelia | | |
| f17-6.aa | gnl\|PID\|d1012343 | gene required for phosphoylation of | 178 | 2.80E−15 |
| | | oligosaccharides/has | | |
| f17-6.aa | gi\|2690207 | (AE000787) B. burgdorferi predicted | 114 | 3.50E−13 |
| | | coding region BBJ02 [Borrelia | | |
| f17-6.aa | gnl\|PID\|e329895 | (AJ000496) cyclic nucleotide-gated | 152 | 1.10E−11 |
| | | channel beta subunit | | |
| f170.aa | gi\|2688652 | (AE001171) B. burgdorferi predicted | 524 | 2.60E−73 |
| | | coding region BB0708 [Borrelia | | |
| f186.aa | gi\|2688622 | (AE001169) B. burgdorferi predicted | 792 | 1.80E−105 |
| | | coding region BB0689 [Borrelia | | |
| f186.aa | gi\|2688622 | (AE001169) B. burgdorferi predicted | 792 | 1.80E−105 |
| | | coding region BB0689 [Borrelia | | |
| f19-2.aa | gi\|2690120 | (AE000789) B. burgdorferi predicted | 1341 | 2.70E−177 |
| | | coding region BBI34 [Borrelia | | |
| f19-2.aa | gi\|2689955 | (AE000785) antigen, P35, putative | 347 | 7.00E−53 |
| | | [Borrelia burgdorferi] | | |
| f19-2.aa | gi\|2690052 | (AE000784) antigen, P35, putative | 254 | 7.70E−53 |
| | | [Borrelia burgdorferi] | | |
| f19-2.aa | gi\|2690100 | (AE000789) B. burgdorferi predicted | 142 | 6.60E−50 |
| | | coding region BBI16 [Borrelia | | |
| f19-2.aa | gi\|2690115 | (AE000789) B. burgdorferi predicted | 144 | 7.60E−34 |
| | | coding region BBI28 [Borrelia | | |
| f19-2.aa | gi\|2690116 | (AE000789) B. burgdorferi predicted | 183 | 2.20E−21 |
| | | coding region BBI29 [Borrelia | | |
| f19-2.aa | gi\|2690207 | (AE000787) B. burgdorferi predicted | 171 | 2.00E−16 |
| | | coding region BBJ02 [Borrelia | | |
| f19-2.aa | gi\|2690099 | (AE000789) B. burgdorferi predicted | 166 | 1.20E−15 |
| | | coding region BBI15 [Borrelia | | |
| f19-2.aa | gi\|2690125 | (AE000788) antigen, P35, putative | 122 | 5.70E−14 |
| | | [Borrelia burgdorferi] | | |
| f19-4.aa | gi\|2690116 | (AE000789) B. burgdorferi predicted | 1129 | 1.30E−150 |
| | | coding region BBI29 [Borrelia | | |
| f19-4.aa | gi\|2690099 | (AE000789) B. burgdorferi predicted | 260 | 3.00E−30 |
| | | coding region BBI15 [Borrelia | | |
| f19-4.aa | gi\|2689955 | (AE000785) antigen, P35, putative | 180 | 1.80E−23 |
| | | [Borrelia burgdorferi] | | |
| f19-4.aa | gi\|2690120 | (AE000789) B. burgdorferi predicted | 183 | 1.50E−21 |
| | | coding region BBI34 [Borrelia | | |
| f19-4.aa | gi\|2690052 | (AE000784) antigen, P35, putative | 192 | 1.20E−19 |
| | | [Borrelia burgdorferi] | | |
| f19-4.aa | gi\|2690207 | (AE000787) B. burgdorferi predicted | 149 | 8.90E−14 |
| | | coding region BBJ02 [Borrelia | | |
| f19-4.aa | gi\|2690098 | (AE000789) B. burgdorferi predicted | 138 | 8.00E−12 |
| | | coding region BBI14 [Borrelia | | |
| f19-6.aa | gi\|2690115 | (AE000789) B. burgdorferi predicted | 995 | 1.20E−131 |
| | | coding region BBI28 [Borrelia | | |
| f19-6.aa | gi\|2690100 | (AE000789) B. burgdorferi predicted | 447 | 3.00E−55 |
| | | coding region BBI16 [Borrelia | | |
| f19-6.aa | gi\|2689955 | (AE000785) antigen, P35, putative | 219 | 2.00E−36 |
| | | [Borrelia burgdorferi] | | |
| f19-6.aa | gi\|2690120 | (AE000789) B. burgdorferi predicted | 144 | 3.50E−34 |
| | | coding region BBI34 [Borrelia | | |
| f19-6.aa | gi\|2690052 | (AE000784) antigen, P35, putative | 130 | 6.30E−12 |
| | | [Borrelia burgdorferi] | | |
| f196.aa | gi\|2688620 | (AE001169) methyl-accepting | 3093 | 0 |
| | | chemotaxis protein (mcp-5) [Borrelia | | |
| f196.aa | gi\|2688621 | (AE001169) methyl-accepting | 615 | 1.90E−83 |
| | | chemotaxis protein (mcp-4) [Borrelia | | |
| f196.aa | gi\|496484 | tlpC gene product [Bacillus subtilis] | 180 | 6.90E−28 |
| | | >pir\|I40496\|I40496 methylation | | |
| f196.aa | gnl\|PID\|d1007002 | methyl-accepting chemotaxis protein | 180 | 4.90E−27 |
| | | TlpC [Bacillus subtilis] | | |
| f196.aa | gnl\|PID\|e1173493 | methyl-accepting chemotaxis protein | 162 | 5.10E−25 |
| | | [Bacillus subtilis] | | |
| f196.aa | gi\|882594 | ORF_f506 [Escherichia coli] | 204 | 1.70E−24 |
| | | >gi\|1789453 (AE000389) aerotaxis | | |
| f196.aa | gi\|148350 | tas [Enterobacter aerogenes] | 179 | 1.80E−24 |
| | | >pir\|D32302\|D32302 probable aspartate | | |
| f196.aa | gi\|1066850 | putative [Rhodobacter capsulatus] | 207 | 1.80E−24 |
| | | >pir\|JC4735\|JC4735 | | |
| f196.aa | gi\|154381 | chemoreceptor [Salmonella | 230 | 2.00E−24 |
| | | typhimurium] >pir\|A47178\|A47178 | | |
| f196.aa | gi\|459690 | transmembrane receptor [Bacillus | 212 | 1.40E−23 |
| | | subtilis] >gnl\|PID\|e1185997 | | |
| f196.aa | gi\|805015 | MCPA protein [Rhodobacter | 237 | 2.10E−23 |
| | | sphaeroides] >pir\|S70094\|S54262 | | |
| f196.aa | gi\|40424 | mcpA gene product [Caulobacter | 238 | 7.30E−23 |
| | | crescentus] >pir\|S23064\|S23064 mcpA | | |
| f196.aa | gi\|144913 | sensory transducer protein [Clostridium | 227 | 8.90E−23 |
| | | thermocellum] | | |
| f196.aa | gi\|1061063 | Trg sensory transducer protein | 211 | 2.40E−20 |
| | | [Escherichia coli] | | |
| f196.aa | gnl\|PID\|d1015762 | Methyl-accepting chemotaxis protein III | 211 | 2.50E−20 |
| | | (MCP-III) (Ribose and | | |
| f197.aa | gi\|2688621 | (AE001169) methyl-accepting | 3724 | 0 |
| | | chemotaxis protein (mcp-4) [Borrelia | | |
| f197.aa | gi\|2688620 | (AE001169) methyl-accepting | 615 | 8.40E−83 |
| | | chemotaxis protein (mcp-5) [Borrelia | | |
| f197.aa | gi\|1066850 | putative [Rhodobacter capsulatus] | 227 | 9.80E−27 |
| | | >pir\|JC4735\|JC4735 | | |
| f197.aa | gi\|882594 | ORF_f506 [Escherichia coli] | 217 | 1.00E−26 |
| | | >gi\|1789453 (AE000389) aerotaxis | | |
| f197.aa | gi\|154381 | chemoreceptor [Salmonella | 239 | 2.80E−25 |
| | | typhimurium] >pir\|A47178\|A47178 | | |
| f197.aa | gi\|496484 | tlpC gene product [Bacillus subtilis] | 202 | 5.10E−25 |
| | | >pir\|I40496\|I40496 methylation | | |
| f197.aa | gnl\|PID\|d1007002 | methyl-accepting chemotaxis protein | 202 | 5.10E−25 |
| | | TlpC [Bacillus subtilis] | | |
| f197.aa | gi\|2564665 | (AF022807) putative methyl accepting | 212 | 7.20E−24 |
| | | chemotaxis protein [Rhizobium | | |
| f197.aa | gi\|459691 | transmembrane receptor [Bacillus | 215 | 1.10E−23 |
| | | subtilis] >gnl\|PID\|e1185996 | | |
| f197.aa | gi\|43218 | serine chemoreceptor [Escherichia coli] | 236 | 2.80E−23 |
| | | >bbs\|127562 serine | | |
| f197.aa | gi\|537197 | CG Site No. 63; alternate gene name | 236 | 2.90E−23 |
| | | cheD [Escherichia coli] | | |
| f197.aa | gi\|148077 | methyl-accepting chemotaxis protein I | 236 | 2.90E−23 |
| | | [Escherichia coli] >gi\|2367378 | | |
| f197.aa | gnl\|PID\|d1009948 | transducer [Pseudomonas aeruginosa] | 178 | 4.20E−23 |
| f197.aa | gi\|148349 | tse [Enterobacter aerogenes] | 234 | 5.50E−23 |
| | | >pir\|C32302\|C32302 serine transducer | | |
| f197.aa | gi\|2626835 | chemotactic transducer [Pseudomonas | 177 | 5.70E−23 |
| | | aeruginosa] | | |
| f200.aa | gi\|2688600 | (AE001168) ribose/galactose ABC | 1887 | 5.10E−266 |
| | | transporter, permease protein | | |
| f200.aa | gnl\|PID\|e311453 | unknown [Bacillus subtilis] | 283 | 1.50E−63 |
| | | >gnl\|PID\|e1184234 similar to | | |
| f200.aa | gi\|2649711 | (AE001042) ribose ABC transporter, | 202 | 1.10E−47 |
| | | permease protein (rbsC-1) | | |
| f200.aa | gi\|2130609 | (AF000308) putative polytopic protein | 119 | 2.10E−27 |
| | | [Mycoplasma fermentans] | | |
| f200.aa | gnl\|PID\|e311493 | unknown [Bacillus subtilis] | 112 | 1.10E−18 |
| | | >gnl\|PID\|e1184235 similar to | | |
| f200.aa | gi\|950073 | membrane forming protein | 161 | 5.60E−16 |
| | | [Mycoplasma capricolum] | | |
| | | >pir\|S77790\|S77790 | | |
| f200.aa | gi\|2688599 | (AE001168) ribose/galactose ABC | 108 | 2.00E−14 |
| | | transporter, permease protein | | |
| f208.aa | gi\|2688610 | (AE001168) B. burgdorferi predicted | 1726 | 6.70E−244 |
| | | coding region BB0674 [Borrelia | | |
| f21-4.aa | gi\|1197833 | Bbk2.11 [Borrelia burgdorferi] | 474 | 3.00E−70 |
| | | >pir\|S70531\|S70531 bbk2.11 protein | | |
| f21-4.aa | gi\|2627267 | ErpL [Borrelia burgdorferi] | 477 | 6.30E−69 |
| f21-4.aa | gi\|1707281 | putative outer membrane protein | 503 | 6.60E−66 |
| | | [Borrelia burgdorferi] | | |
| f21-4.aa | gi\|896042 | OspF [Borrelia burgdorferi] | 503 | 6.60E−66 |
| | | >pir\|S70532\|S70532 outer surface | | |
| | | protein | | |
| f21-4.aa | gi\|1707287 | putative outer membrane protein | 489 | 3.00E−60 |
| | | [Borrelia burgdorferi] | | |
| f21-4.aa | gi\|1707290 | putative outer surface protein [Borrelia | 342 | 3.20E−49 |
| | | burgdorferi] | | |
| f21-4.aa | gi\|1663633 | ErpK [Borrelia burgdorferi] | 268 | 1.70E−48 |
| f21-4.aa | gi\|466482 | outer surface protein F [Borrelia | 321 | 3.80E−38 |
| | | burgdorferi] >pir\|I40287\|I40287 | | |
| f21-4.aa | gi\|896038 | BbK2.10 precursor [Borrelia | 121 | 3.90E−34 |
| | | burgdorferi] >pir\|S70534\|S70534 | | |
| | | bbK2.10 | | |
| f21-4.aa | gi\|896040 | BbK2.10 precursor [Borrelia | 118 | 2.30E−33 |
| | | burgdorferi] >pir\|S70533\|S70533 | | |
| | | bbK2.10 | | |
| f21-4.aa | gi\|1051120 | outer surface protein G [Borrelia | 107 | 3.30E−33 |
| | | burgdorferi] >gi\|1373118 ErpG | | |
| f21-4.aa | gi\|2444428 | (AF020657) ErpX protein [Borrelia | 118 | 6.00E−14 |
| | | burgdorferi] | | |
| f210.aa | gi\|2688603 | (AE001168) conserved hypothetical | 867 | 2.60E−116 |
| | | protein [Borrelia burgdorferi] | | |
| f210.aa | gi\|2688604 | (AE001168) chemotaxis response | 733 | 1.40E−97 |
| | | regulator (cheY-3) [Borrelia | | |
| f210.aa | gi\|1408274 | CheY [Borrelia burgdorferi] | 720 | 9.00E−96 |
| f210.aa | gi\|1765976 | chemotaxis protein CheY [Treponema | 405 | 6.60E−52 |
| | | pallidum] | | |
| f210.aa | gi\|142682 | chemotactic response protein [Bacillus | 184 | 8.00E−30 |
| | | subtilis] >gnl\|PID\|e1185224 | | |
| f210.aa | gi\|940149 | CheY [Thermotoga maritima] | 171 | 1.50E−27 |
| f210.aa | gi\|2649557 | (AE001031) chemotaxis response | 168 | 1.50E−26 |
| | | regulator (cheY) [Archaeoglobus | | |
| f210.aa | gi\|620085 | cheY gene product [Listeria | 183 | 3.00E−26 |
| | | monocytogenes] | | |
| f210.aa | gnl\|PID\|e249646 | YneI [Bacillus subtilis] >gi\|870926 | 166 | 4.00E−24 |
| | | response regulator | | |
| f210.aa | gi\|149620 | ORF2 [Leptospira borgpetersenii] | 121 | 4.70E−22 |
| | | >sp\|P24086\|YLB3_LEPIN | | |
| | | HYPOTHETICAL | | |
| f210.aa | gi\|1408275 | orfX; putative OrfX protein [Borrelia | 208 | 9.20E−22 |
| | | burgdorferi] | | |
| f210.aa | gi\|994802 | cheY gene product [Halobacterium | 139 | 8.90E−18 |
| | | salinarium] >pir\|S58645\|S58645 CheY | | |
| f210.aa | gi\|143598 | spo0F [Bacillus subtilis] >gi\|143601 | 113 | 4.70E−11 |
| | | Spo0F protein [Bacillus | | |
| f216.aa | gi\|2688586 | (AE001167) conserved hypothetical | 804 | 1.20E−109 |
| | | protein [Borrelia burgdorferi] | | |
| f216.aa | gi\|1575446 | orfA [Borrelia burgdorferi] | 472 | 1.10E−91 |
| f219.aa | gi\|2688594 | (AE001167) B. burgdorferi predicted | 1122 | 3.10E−148 |
| | | coding region BB0664 [Borrelia | | |
| f22.aa | gi\|2688779 | (AE001181) B. burgdorferi predicted | 1400 | 4.90E−188 |
| | | coding region BB0832 [Borrelia | | |
| f22.aa | gi\|2688779 | (AE001181) B. burgdorferi predicted | 1400 | 4.90E−188 |
| | | coding region BB0832 [Borrelia | | |
| f221.aa | gi\|2688596 | (AE001167) B. burgdorferi predicted | 692 | 2.60E−93 |
| | | coding region BB0662 [Borrelia | | |
| f229.aa | gi\|2688591 | (AE001167) oxygen-independent | 863 | 7.80E−120 |
| | | coproporphyrinogen III oxidase, | | |
| f24-1.aa | gi\|2039285 | putative vls recombination cassette Vls6 | 924 | 1.80E−114 |
| | | [Borrelia burgdorferi] | | |
| f24-1.aa | gi\|2039284 | putative vls recombination cassette Vls5 | 867 | 6.30E−107 |
| | | [Borrelia burgdorferi] | | |
| f24-1.aa | gi\|2039287 | putative vls recombination cassette Vls8 | 824 | 1.50E−104 |
| | | [Borrelia burgdorferi] | | |
| f24-1.aa | gi\|2039289 | putative vls recombination cassette | 829 | 7.50E−102 |
| | | Vls10 [Borrelia burgdorferi] | | |
| f24-1.aa | gi\|2039320 | vmp-like sequence protein VlsE | 644 | 1.10E−98 |
| | | [Borrelia burgdorferi] | | |
| f24-1.aa | gi\|2039288 | putative vls recombination cassette Vls9 | 783 | 8.20E−96 |
| | | [Borrelia burgdorferi] | | |
| f24-1.aa | gi\|2039330 | vmp-like sequence protein VlsE | 742 | 6.30E−95 |
| | | [Borrelia burgdorferi] | | |
| f24-1.aa | gi\|2039336 | vmp-like sequence protein VlsE | 509 | 1.50E−92 |
| | | [Borrelia burgdorferi] | | |
| f24-1.aa | gi\|2039286 | putative vls recombination cassette Vls7 | 754 | 6.60E−92 |
| | | [Borrelia burgdorferi] | | |
| f24-1.aa | gi\|2039324 | vmp-like sequence protein VlsE | 488 | 8.10E−86 |
| | | [Borrelia burgdorferi] | | |
| f24-1.aa | gi\|2039316 | vmp-like sequence protein VlsE | 531 | 1.70E−85 |
| | | [Borrelia burgdorferi] | | |
| f24-1.aa | gi\|2039312 | vmp-like sequence protein VlsE | 531 | 1.20E−83 |
| | | [Borrelia burgdorferi] | | |
| f24-1.aa | gi\|2039326 | vmp-like sequence protein VlsE | 476 | 2.00E−82 |
| | | [Borrelia burgdorferi] | | |
| f24-1.aa | gi\|2039332 | vmp-like sequence protein VlsE | 474 | 5.10E−82 |
| | | [Borrelia burgdorferi] | | |
| f24-1.aa | gi\|2039328 | vmp-like sequence protein VlsE | 420 | 3.50E−59 |
| | | [Borrelia burgdorferi] | | |
| f253.aa | gi\|2688567 | (AE001165) Na+/H+ antiporter (nhaC- | 2247 | 0 |
| | | 1) [Borrelia burgdorferi] | | |
| f253.aa | gi\|2688566 | (AE001165) Na+/H+ antiporter (nhaC- | 609 | 6.40E−155 |
| | | 2) [Borrelia burgdorferi] | | |
| f253.aa | gi\|2209268 | Na+/H+ antiporter [Bacillus firmus] | 158 | 9.40E−15 |
| | | >pir\|A41594\|A41594 | | |
| f253.aa | gi\|1574661 | Na+/H+ antiporter (nhaC) | 143 | 4.20E−14 |
| | | [Haemophilus influenzae] | | |
| f253.aa | gnl\|PID\|e1185625 | similar to Na+/H+ antiporter [Bacillus | 137 | 1.20E−11 |
| | | subtilis] | | |
| f253.aa | gnl\|PID\|e324972 | hypothetical protein [Bacillus subtilis] | 133 | 2.00E−11 |
| | | >gnl\|PID\|e1182969 | | |
| f265.aa | gi\|2688555 | (AE001164) conserved hypothetical | 1196 | 9.90E−161 |
| | | protein [Borrelia burgdorferi] | | |
| f269.aa | gi\|2688560 | (AE001164) B. burgdorferi predicted | 1654 | 5.50E−226 |
| | | coding region BB0624 [Borrelia | | |
| f28-2.aa | gi\|2690174 | (AE000788) B. burgdorferi predicted | 1683 | 2.80E−222 |
| | | coding region BBK47 [Borrelia | | |
| f28-2.aa | gi\|2690161 | (AE000788) B. burgdorferi predicted | 1068 | 2.20E−163 |
| | | coding region BBK49 [Borrelia | | |
| f28-3.aa | gi\|2690138 | (AE000788) immunogenic protein P37, | 281 | 6.00E−48 |
| | | putative [Borrelia burgdorferi] | | |
| f28-3.aa | gi\|2690127 | (AE000788) immunogenic protein P37 | 209 | 3.20E−28 |
| | | [Borrelia burgdorferi] | | |
| f28-3.aa | gi\|2459605 | immunogenic protein P37 [Borrelia | 208 | 4.50E−28 |
| | | burgdorferi] | | |
| f28-3.aa | gi\|2690137 | (AE000788) immunogenic protein P37, | 172 | 5.50E−17 |
| | | putative [Borrelia burgdorferi] | | |
| f29.aa | gi\|2688764 | (AE001180) B. burgdorferi predicted | 869 | 8.20E−116 |
| | | coding region BB0826 [Borrelia | | |
| f290.aa | gi\|2688537 | (AE001162) serine-type D-Ala-D-Ala | 2046 | 1.50E−281 |
| | | carboxypeptidase (dacA) | | |
| f290.aa | gi\|143439 | DD-carboxypeptidase [Bacillus subtilis] | 161 | 6.60E−36 |
| | | >pir\|B42708\|B42708 | | |
| f290.aa | gnl\|PID\|e1185617 | D-alanyl-D-alanine carboxypeptidase | 161 | 6.60E−36 |
| | | (penicilin binding | | |
| f290.aa | gnl\|PID\|d1016562 | Probable penicillin-binding protein. | 131 | 3.30E−28 |
| | | [Escherichia coli] | | |
| f290.aa | sp\|P37604\|DACD_SALTY | PENICILLIN-BINDING PROTEIN 6B | 135 | 9.10E−28 |
| | | PRECURSOR | | |
| f290.aa | gi\|1572974 | penicillin-binding protein 5 (dacA) | 145 | 3.00E−27 |
| | | [Haemophilus influenzae] | | |
| f290.aa | gi\|580849 | D-alanine carboxypeptidase [Bacillus | 170 | 4.10E−27 |
| | | stearothermophilus] | | |
| f290.aa | gi\|1778549 | penicillin-binding protein 5 | 152 | 3.20E−26 |
| | | [Escherichia coli] >gi\|41212 precursor | | |
| f290.aa | gi\|142820 | penicillin-binding protein 5 [Bacillus | 137 | 4.60E−26 |
| | | subtilis] | | |
| f290.aa | gi\|410134 | penicillin-binding protein [Bacillus | 137 | 4.60E−26 |
| | | subtilis] >gnl\|PID\|e1185588 | | |
| f290.aa | gi\|41218 | precursor [Escherichia coli] | 136 | 1.30E−25 |
| f290.aa | gnl\|PID\|d1015262 | Penicillin-binding protein 6 precursor | 136 | 1.30E−25 |
| | | (D-alanyl-D-alanine | | |
| f290.aa | gi\|1864022 | pencillin binding protein 4 | 155 | 5.10E−22 |
| | | [Staphylococcus aureus] | | |
| f290.aa | gnl\|PID\|e154145 | penicillin binding protein 4 | 155 | 5.10E−22 |
| | | [Staphylococcus aureus] | | |
| f290.aa | gnl\|PID\|e264682 | penicillin-binding protein 4 | 155 | 5.10E−22 |
| | | [Staphylococcus aureus] | | |
| f291.aa | gi\|2688538 | (AE001162) L-lactate permease (lctP) | 2473 | 0 |
| | | [Borrelia burgdorferi] | | |
| f291.aa | gnl\|PID\|e274704 | lactate premease [Streptococcus iniae] | 586 | 1.20E−132 |
| f291.aa | gi\|882504 | ORF_f560 [Escherichia coli] | 345 | 3.60E−95 |
| | | >gi\|1789347 (AE000380) f560; This | | |
| | | 560 aa | | |
| f291.aa | gi\|2313225 | (AE000535) L-lactate permease (lctP) | 359 | 1.10E−94 |
| | | [Helicobacter pylori] | | |
| f291.aa | gi\|2313224 | (AE000535) L-lactate permease (lctP) | 348 | 2.90E−93 |
| | | [Helicobacter pylori] | | |
| f291.aa | gi\|404693 | L-lactate permease [Escherichia coli] | 331 | 7.20E−82 |
| | | >gi\|466741 aug is 3rd start | | |
| f291.aa | gnl\|PID\|e313006 | hypothetical protein [Bacillus subtilis] | 330 | 9.00E−80 |
| | | >gnl\|PID\|e1186107 | | |
| f291.aa | gnl\|PID\|d1022632 | lactate permease [Bacillus subtilis] | 300 | 1.70E−61 |
| f291.aa | gnl\|PID\|e1182258 | L-lactate permease [Bacillus subtilis] | 300 | 1.10E−60 |
| | | >pir\|F69649\|F69649 | | |
| f291.aa | gnl\|PID\|d1009575 | homologue of L-lactate permease of E. coli | 265 | 6.40E−56 |
| | | [Bacillus | | |
| f291.aa | gi\|2649804 | (AE001049) L-lactate permease (lctP) | 170 | 1.50E−47 |
| | | [Archaeoglobus fulgidus] | | |
| f291.aa | gnl\|PID\|e283914 | L-lactate permease [Sulfolobus | 163 | 2.60E−44 |
| | | solfataricus] | | |
| f291.aa | gi\|1574148 | L-lactate permease (lctP) [Haemophilus | 173 | 6.00E−35 |
| | | influenzae] | | |
| f296.aa | gi\|2688517 | (AE001161) chaperonin, putative | 1276 | 4.40E−177 |
| | | [Borrelia burgdorferi] | | |
| f296.aa | gi\|840643 | mucZ gene product [Coxiella burnetii] | 101 | 7.90E−12 |
| | | >pir\|I40852\|I40852 mucZ | | |
| f3.aa | gi\|2688797 | (AE001183) B. burgdorferi predicted | 1604 | 1.40E−211 |
| | | coding region BB0844 [Borrelia | | |
| f30.aa | gi\|2688765 | (AE001180) B. burgdorferi predicted | 1343 | 2.00E−181 |
| | | coding region BB0825 [Borrelia | | |
| f301.aa | gi\|2688521 | (AE001161) methyl-accepting | 2756 | 0 |
| | | chemotaxis protein (mcp-3) [Borrelia | | |
| f301.aa | gi\|1805311 | methyl-accepting chemotaxis protein B | 211 | 7.00E−20 |
| | | [Treponema denticola] | | |
| f301.aa | gi\|2688522 | (AE001161) methyl-accepting | 189 | 2.80E−18 |
| | | chemotaxis protein (mcp-2) [Borrelia | | |
| f301.aa | gi\|2367665 | (AF016689) Mcp-2 [Treponema | 189 | 3.50E−17 |
| | | pallidum] | | |
| f301.aa | gi\|2352917 | (AF012922) methyl-accepting | 187 | 5.70E−17 |
| | | chemotaxis protein [Treponema | | |
| f301.aa | gi\|1354776 | MCP-1 [Treponema pallidum] | 189 | 5.90E−17 |
| f301.aa | gi\|2619023 | (AF027868) YoaH [Bacillus subtilis] | 184 | 2.80E−16 |
| | | >gnl\|PID\|e1185333 similar to | | |
| f301.aa | gi\|1654421 | transducer HtB protein [Halobacterium | 177 | 2.20E−15 |
| | | salinarum] | | |
| f301.aa | gi\|415694 | chemoreceptor [Desulfovibrio vulgaris] | 163 | 3.50E−15 |
| | | >pir\|G36943\|G36943 | | |
| f301.aa | gi\|459691 | transmembrane receptor [Bacillus | 163 | 4.90E−15 |
| | | subtilis] >gnl\|PID\|e1185996 | | |
| f301.aa | gi\|2104730 | ORF2 [Desulfurococcus sp. ] | 173 | 5.80E−15 |
| f301.aa | gi\|2914132 | methyl accepting chemotaxis homolog | 170 | 1.10E−14 |
| | | [Treponema denticola] | | |
| f301.aa | gi\|459689 | transmembrane receptor [Bacillus | 164 | 1.30E−14 |
| | | subtilis] >gnl\|PID\|e1185998 | | |
| f301.aa | gi\|496484 | tlpC gene product [Bacillus subtilis] | 170 | 3.80E−14 |
| | | >pir\|I40496\|I40496 methylation | | |
| f301.aa | gi\|2313163 | (AE000530) methyl-accepting | 170 | 6.30E−14 |
| | | chemotaxis transducer (tlpC) | | |
| f308.aa | gi\|2688527 | (AE001161) B. burgdorferi predicted | 1227 | 1.70E−176 |
| | | coding region BB0592 [Borrelia | | |
| f31-2.aa | gi\|2690202 | (AE000787) B. burgdorferi predicted | 1771 | 7.20E−235 |
| | | coding region BBJ36 [Borrelia | | |
| f31-2.aa | gi\|2690200 | (AE000787) B. burgdorferi predicted | 423 | 4.60E−88 |
| | | coding region BBJ34 [Borrelia | | |
| f31.aa | gi\|2688766 | (AE001180) B. burgdorferi predicted | 957 | 7.80E−133 |
| | | coding region BB0824 [Borrelia | | |
| f314.aa | gi\|2688509 | (AE001160) pfs protein (pfs-2) | 1329 | 7.40E−180 |
| | | [Borrelia burgdorferi] | | |
| f314.aa | gi\|2690087 | (AE000789) pfs protein (pfs) [Borrelia | 335 | 1.50E−77 |
| | | burgdorferi] | | |
| f314.aa | gi\|2688288 | (AE001143) pfs protein (pfs-1) | 266 | 1.00E−65 |
| | | [Borrelia burgdorferi] | | |
| f314.aa | gi\|2738591 | (AF012886) Pfs [Buchnera aphidicola] | 115 | 1.70E−52 |
| f314.aa | gi\|1552737 | similar to purine nucleoside | 133 | 6.90E−52 |
| | | phosphorylase (deoD) [Escherichia | | |
| f314.aa | gnl\|PID\|e1183957 | similar to purine nucleoside | 157 | 1.20E−49 |
| | | phosphorylase [Bacillus | | |
| f314.aa | gi\|147158 | pfs [Escherichia coli] >gi\|457107 ORF | 133 | 2.50E−42 |
| | | [Escherichia coli] {(SUB 9-219} | | |
| f314.aa | gi\|1574146 | pfs protein (pfs) [Haemophilus | 110 | 2.70E−37 |
| | | influenzae] >pir\|C64169\|C64169 pfs | | |
| f314.aa | gi\|2267164 | (AF009177) pfs protein homolog | 118 | 3.30E−23 |
| | | [Helicobacter pylori] | | |
| f314.aa | gi\|2313168 | (AE000530) pfs protein (pfs) | 115 | 1.00E−22 |
| | | [Helicobacter pylori] | | |
| f314.aa | gi\|1777939 | Pfs [Treponema pallidum] | 102 | 1.90E−20 |
| f314.aa | gi\|2689970 | (AE000785) B. burgdorferi predicted | 191 | 1.50E−19 |
| | | coding region BBE07 [Borrelia | | |
| f314.aa | gnl\|PID\|e249405 | unknown [Mycobacterium tuberculosis] | 105 | 7.60E−16 |
| | | >sp\|Q10889\|Y05A_MYCTU | | |
| f32-4.aa | gi\|2690221 | (AE000787) B. burgdorferi predicted | 1192 | 4.00E−163 |
| | | coding region BBJ47 [Borrelia | | |
| f32-4.aa | gi\|2689979 | (AE000785) B. burgdorferi predicted | 103 | 4.10E−11 |
| | | coding region BBE16 [Borrelia | | |
| f32.aa | gi\|2688767 | (AE001180) B. burgdorferi predicted | 623 | 1.80E−81 |
| | | coding region BB0823 [Borrelia | | |
| f32.aa | gi\|2688767 | (AE001180) B. burgdorferi predicted | 623 | 1.80E−81 |
| | | coding region BB0823 [Borrelia | | |
| f320.aa | gi\|2688497 | (AE001159) carboxypeptidase, putative | 1373 | 6.40E−186 |
| | | [Borrelia burgdorferi] | | |
| f320.aa | gi\|2529473 | (AF006665) YokZ [Bacillus subtilis] | 136 | 9.80E−28 |
| f320.aa | gi\|2415396 | (AF015775) carboxypeptidase [Bacillus | 136 | 1.90E−27 |
| | | subtilis] >gnl\|PID\|e1185433 | | |
| f320.aa | gi\|1209528 | D,D-carboxypeptidase [Enterococcus | 148 | 3.30E−16 |
| | | faecalis] >sp\|Q47746\|VANY_ENTFA | | |
| f320.aa | gi\|155044 | vanY [Transposon Tn1546] >gi\|149126 | 142 | 1.60E−13 |
| | | D,D-carboxypeptidase [Plasmid | | |
| f328.aa | gi\|2688502 | (AE001159) CTP synthase (pyrG) | 869 | 6.10E−119 |
| | | [Borrelia burgdorferi] | | |
| f328.aa | gi\|1591801 | CTP synthase (pyrG) [Methanococcus | 325 | 6.20E−59 |
| | | jannaschii] >pir\|E64446\|E64446 | | |
| f328.aa | gi\|2650385 | (AE001088) CTP synthase (pyrG) | 304 | 4.20E−54 |
| | | [Archaeoglobus fulgidus] | | |
| f328.aa | gi\|1399854 | CTP synthetase [Synechococcus | 313 | 3.30E−52 |
| | | PCC7942] >sp\|Q54775\|PYRG_SYNP7 | | |
| | | CTP | | |
| f328.aa | gnl\|PID\|d1019032 | CTP synthetase [Synechocystis sp.] | 295 | 1.80E−50 |
| | | >pir\|S75840\|S75840 CTP | | |
| f328.aa | gi\|143597 | CTP synthetase [Bacillus subtilis] | 274 | 1.60E−49 |
| | | >gi\|853762 CTP synthase [Bacillus | | |
| f328.aa | gi\|2983754 | (AE000735) CTP synthetase [Aquifex | 271 | 1.50E−46 |
| | | aeolicus] | | |
| f328.aa | gi\|1574630 | CTP synthetase (pyrG) [Haemophilus | 234 | 1.90E−44 |
| | | influenzae] >pir\|F64181\|F64181 | | |
| f328.aa | gi\|413755 | CTP synthetase [Spiroplasma citri] | 231 | 3.00E−44 |
| | | >sp\|P52200\|PYRG_SPICI CTP | | |
| f328.aa | gi\|2621483 | (AE000826) CTP synthase | 257 | 2.80E−40 |
| | | [Methanobacterium | | |
| | | thermoautotrophicum] | | |
| f328.aa | gi\|950067 | CTP synthase [Mycoplasma | 220 | 4.10E−39 |
| | | capricolum] >pir\|S77767\|S77767 CTP | | |
| | | synthase | | |
| f328.aa | gi\|904007 | cytidine triphosphate synthetase | 219 | 2.00E−38 |
| | | precursor [Giardia intestinalis] | | |
| f328.aa | gi\|147478 | CTP synthetase (EC 6.3.4.2) | 217 | 2.90E−38 |
| | | [Escherichia coli] | | |
| f328.aa | gi\|882674 | CTP synthetase [Escherichia coli] | 214 | 7.70E−38 |
| | | >gi\|1789142 (AE000361) CTP | | |
| f328.aa | gi\|38688 | CTP synthase [Azospirillum brasilense] | 132 | 3.20E−37 |
| | | >pir\|I39496\|S25101 CTP | | |
| f342.aa | gi\|2688495 | (AE001158) B. burgdorferi predicted | 944 | 5.30E−130 |
| | | coding region BB0563 [Borrelia | | |
| f346.aa | gi\|1272356 | phosphotransferase enzyme II [Borrelia | 828 | 1.10E−108 |
| | | burgdorferi] >gi\|2688474 | | |
| f346.aa | gi\|145603 | PTS enzyme III glc [Escherichia coli] | 385 | 8.80E−53 |
| | | >gi\|145605 PTS enzyme III glc | | |
| f346.aa | gi\|1314675 | glucose-specific component IIA of the | 385 | 9.30E−53 |
| | | PTS system [Escherichia coli] | | |
| f346.aa | gi\|47658 | III(Glc) (crr) (AA 1-169) [Salmonella | 382 | 2.30E−52 |
| | | typhimurium] | | |
| f346.aa | gi\|1574566 | glucose phosphotransferase enzyme III- | 397 | 8.70E−50 |
| | | glc (crr) [Haemophilus | | |
| f346.aa | gi\|43819 | nagE gene product [Klebsiella | 349 | 2.80E−41 |
| | | pneumoniae] >pir\|S18607\|S18607 | | |
| f346.aa | gi\|146913 | N-acetylglucosamine transport protein | 334 | 3.20E−39 |
| | | [Escherichia coli] | | |
| f346.aa | gi\|1072418 | glcA [Staphylococcus carnosus] | 317 | 7.20E−37 |
| | | >pir\|S46952\|S46952 | | |
| f346.aa | gi\|1072419 | glcB [Staphylococcus carnosus] | 315 | 1.40E−36 |
| | | >pir\|S63606\|S46953 | | |
| f346.aa | gi\|1146177 | phosphotransferase system glucose- | 295 | 7.30E−36 |
| | | specific enzyme II [Bacillus | | |
| f346.aa | gi\|529001 | PTS glucose-specific permease | 294 | 8.80E−36 |
| | | [Bacillus stearothermophilus] | | |
| f346.aa | gnl\|PID\|e1182187 | alternate gene name: yzfA; similar to | 293 | 1.40E−33 |
| | | phosphotransferase | | |
| f346.aa | gi\|580912 | enzyme III-glucose [Bacillus subtilis] | 257 | 1.20E−30 |
| f346.aa | gi\|602681 | phosphocarrier protein (enzyme IIA) | 243 | 1.00E−28 |
| | | [Mycoplasma capricolum] | | |
| f346.aa | gi\|1432153 | cellobiose-specific PTS permease | 257 | 1.20E−28 |
| | | [Klebsiella oxytoca] | | |
| f352.aa | gi\|2688482 | (AE001157) B. burgdorferi predicted | 2547 | 0 |
| | | coding region BB0553 [Borrelia | | |
| f352.aa | gi\|2688482 | (AE001157) B. burgdorferi predicted | 1005 | 1.30E−132 |
| | | coding region BB0553 [Borrelia | | |
| f363.aa | gi\|2688468 | (AE001156) B. burgdorferi predicted | 1109 | 5.40E−153 |
| | | coding region BB0543 [Borrelia | | |
| f368.aa | gi\|2688450 | (AE001155) conserved hypothetical | 1133 | 4.10E−157 |
| | | integral membrane protein | | |
| f368.aa | gi\|1787004 | (AE000181) o234; This 234 aa ORF is | 417 | 1.40E−67 |
| | | 26 pct identical (15 gaps) to | | |
| f368.aa | gi\|2314055 | (AE000601) conserved hypothetical | 129 | 3.50E−16 |
| | | integral membrane protein | | |
| f368.aa | gnl\|PID\|e1289272 | S1R [Cowpox virus] | 135 | 1.80E−14 |
| f368.aa | gnl\|PID\|d1003176 | 24 K membrane protein [Pseudomonas | 108 | 9.00E−13 |
| | | aeruginosa] | | |
| f368.aa | gi\|41284 | put. 23.5-kd protein [Escherichia coli] | 101 | 1.00E−11 |
| | | >gi\|1787205 (AE000199) | | |
| f371.aa | gi\|2688452 | (AE001155) conserved hypothetical | 1066 | 3.60E−143 |
| | | protein [Borrelia burgdorferi] | | |
| f371.aa | gi\|2196997 | Orf256 [Treponema pallidum] | 154 | 1.10E−15 |
| f373.aa | gi\|2688453 | (AE001155) zinc protease, putative | 3663 | 0 |
| | | [Borrelia burgdorferi] | | |
| f373.aa | gi\|1574200 | hypothetical [Haemophilus influenzae] | 295 | 2.70E−67 |
| | | >pir\|E64171\|E64171 | | |
| f373.aa | gi\|1787770 | (AE000246) f931; residues 5-650 are | 289 | 1.10E−57 |
| | | 99 pct identical to YDDC_ECOLI | | |
| f373.aa | gi\|535004 | cds106 gene product [Escherichia coli] | 289 | 3.20E−57 |
| f373.aa | gi\|799369 | metalloendopeptidase [Pisum sativum] | 148 | 7.10E−28 |
| f373.aa | gi\|2827039 | (AF008444) chloroplast processing | 150 | 1.70E−26 |
| | | enzyme [Arabidopsis thaliana] | | |
| f373.aa | gi\|2983709 | (AE000732) processing protease | 136 | 4.30E−24 |
| | | [Aquifex aeolicus] | | |
| f373.aa | gi\|2314155 | (AE000609) protease (pqqE) | 115 | 5.30E−23 |
| | | [Helicobacter pylori] | | |
| | | >pir\|D64646\|D64646 | | |
| f378.aa | gi\|2688458 | (AE001155) B. burgdorferi predicted | 1030 | 1.30E−136 |
| | | coding region BB0531 [Borrelia | | |
| f384.aa | gi\|2688435 | (AE001154) inositol monophosphatase | 1470 | 3.80E−201 |
| | | [Borrelia burgdorferi] | | |
| f4-15.aa | gi\|2690238 | (AE000790) surface lipoprotein P27 | 1400 | 1.50E−185 |
| | | [Borrelia burgdorferi] | | |
| f4-15.aa | gi\|144008 | P27 [Borrelia burgdorferi] | 462 | 2.40E−96 |
| | | >pir\|S34995\|S34995 surface lipoprotein | | |
| f4-50.aa | gi\|2690243 | (AE000790) decorin binding protein B | 900 | 6.30E−117 |
| | | (dbpB) [Borrelia burgdorferi] | | |
| f4-50.aa | gi\|2062381 | decorin binding protein B [Borrelia | 897 | 1.60E−116 |
| | | burgdorferi] | | |
| f4-50.aa | gi\|2809217 | (AF042796) putative decorin-binding | 887 | 3.60E−115 |
| | | protein precursor [Borrelia | | |
| f4-50.aa | gi\|2809218 | (AF042796) decorin-binding protein | 172 | 2.00E−33 |
| | | precursor [Borrelia burgdorferi] | | |
| f4-50.aa | gi\|2690249 | (AE000790) decorin binding protein A | 176 | 9.50E−33 |
| | | (dbpA) [Borrelia burgdorferi] | | |
| f4-50.aa | gi\|2062379 | decorin binding protein A [Borrelia | 177 | 6.10E−32 |
| | | burgdorferi] | | |
| f4-66.aa | gi\|2690229 | (AE000790) chpAI protein, putative | 807 | 1.60E−107 |
| | | [Borrelia burgdorferi] | | |
| f4.aa | gi\|2688787 | (AE001183) conserved hypothetical | 2408 | 0 |
| | | integral membrane protein | | |
| f4.aa | gi\|2697115 | (AF008219) unknown [Borrelia afzelii] | 1138 | 1.90E−305 |
| f4.aa | gi\|1573583 | H. influenzae predicted coding region | 337 | 2.10E−109 |
| | | HI0594 [Haemophilus | | |
| f4.aa | gi\|1788636 | (AE000319) o513; This 513 aa ORF is | 327 | 9.10E−80 |
| | | 31 pct identical (30 gaps) to | | |
| f4.aa | gnl\|PID\|d1009571 | homologue of hypothetical protein | 357 | 5.40E−69 |
| | | HI10594 of H. influenzae | | |
| f42-1.aa | gi\|2689993 | (AE000794) conserved hypothetical | 495 | 2.70E−62 |
| | | protein [Borrelia burgdorferi] | | |
| f42-1.aa | gi\|2689934 | (AE000793) conserved hypothetical | 312 | 1.00E−37 |
| | | protein [Borrelia burgdorferi] | | |
| f43-3.aa | gi\|1209843 | lipoprotein [Borrelia burgdorferi] | 546 | 1.50E−69 |
| f43-3.aa | gi\|2121280 | (AF000270) lipoprotein [Borrelia | 442 | 1.80E−55 |
| | | burgdorferi] >gi\|3095109 | | |
| f43-3.aa | gi\|1209837 | lipoprotein [Borrelia burgdorferi] | 365 | 3.10E−55 |
| f43-3.aa | gi\|1209873 | lipoprotein [Borrelia burgdorferi] | 269 | 5.30E−32 |
| f43-3.aa | gi\|1209849 | lipoprotein [Borrelia burgdorferi] | 141 | 1.70E−13 |
| f43-3.aa | gi\|3095105 | (AF046998) 2.9-8 lipoprotein [Borrelia | 140 | 9.60E−13 |
| | | burgdorferi] | | |
| f43-3.aa | gi\|3095107 | (AF046999) 2.9-9 lipoprotein [Borrelia | 132 | 1.40E−11 |
| | | burgdorferi] | | |
| f43.aa | gi\|2688752 | (AE001179) B. burgdorferi predicted | 2337 | 6.60000000084856e−315 |
| | | coding region BB0811 [Borrelia | | |
| f446.aa | gi\|2688383 | (AE001151) B. burgdorferi predicted | 920 | 7.20E−124 |
| | | coding region BB0464 [Borrelia | | |
| f45-2.aa | gi\|1699017 | ErpB2 [Borrelia burgdorferi] | 364 | 7.50E−78 |
| | | >gi\|1373133 ErpB [Borrelia | | |
| f45-2.aa | gi\|2627270 | ErpJ [Borrelia burgdorferi] | 364 | 2.50E−77 |
| f45-2.aa | gi\|2627268 | ErpM [Borrelia burgdorferi] | 452 | 9.70E−60 |
| f45-2.aa | gi\|1373144 | ErpD [Borrelia burgdorferi] | 316 | 1.60E−58 |
| f45-2.aa | gi\|2444428 | (AF020657) ErpX protein [Borrelia | 380 | 2.80E−55 |
| | | burgdorferi] | | |
| f45-2.aa | gi\|1051120 | outer surface protein G [Borrelia | 213 | 7.10E−35 |
| | | burgdorferi] >gi\|1373118 ErpG | | |
| f45-2.aa | gi\|1663633 | ErpK [Borrelia burgdorferi] | 152 | 1.60E−21 |
| f45-2.aa | gnl\|PID\|e329895 | (AJ000496) cyclic nucleotide-gated | 198 | 2.80E−16 |
| | | channel beta subunit | | |
| f45-2.aa | gi\|466482 | outer surface protein F [Borrelia | 111 | 5.70E−14 |
| | | burgdorferi] >pir\|I40287\|I40287 | | |
| f45-2.aa | gi\|2246532 | ORF 73, contains large complex repeat | 174 | 5.90E−14 |
| | | CR 73 [Kaposi's | | |
| f45-2.aa | gi\|160299 | glutamic acid-rich protein [Plasmodium | 169 | 1.00E−13 |
| | | falciparum] | | |
| f45-2.aa | gi\|1707287 | putative outer membrane protein | 101 | 2.20E−13 |
| | | [Borrelia burgdorferi] | | |
| f45-2.aa | gi\|1633572 | Herpesvirus saimiri ORF73 homolog | 175 | 4.10E−13 |
| | | [Kaposi's sarcoma-associated | | |
| f45-2.aa | gnl\|PID\|d1012343 | gene required for phosphoylation of | 166 | 5.60E−13 |
| | | oligosaccharides/has | | |
| f45-2.aa | gi\|2690100 | (AE000789) B. burgdorferi predicted | 161 | 2.70E−12 |
| | | coding region BBI16 [Borrelia | | |
| f457.aa | gi\|2688369 | (AE001150) B. burgdorferi predicted | 1021 | 6.20E−139 |
| | | coding region BB0456 [Borrelia | | |
| f469.aa | gi\|2688368 | (AE001150) Na+/H+ antiporter (napA) | 1544 | 1.10E−211 |
| | | [Borrelia burgdorferi] | | |
| f47-2.aa | gi\|1209849 | lipoprotein [Borrelia burgdorferi] | 742 | 2.30E−97 |
| f47-2.aa | gi\|1209857 | lipoprotein [Borrelia burgdorferi] | 407 | 7.80E−86 |
| f47-2.aa | gi\|1209831 | lipoprotein [Borrelia burgdorferi] | 393 | 5.00E−82 |
| f47-2.aa | gnl\|PID\|e268245 | surface-exposed lipoprotein [Borrelia | 321 | 2.60E−73 |
| | | burgdorferi] | | |
| f47-2.aa | gi\|1209874 | lipoprotein [Borrelia burgdorferi] | 348 | 1.10E−64 |
| f47-2.aa | gnl\|PID\|e268239 | surface-exposed lipoprotein [Borrelia | 333 | 1.40E−57 |
| | | garinii] | | |
| f47-2.aa | gnl\|PID\|e268244 | surface-exposed lipoprotein [Borrelia | 292 | 9.60E−44 |
| | | afzelii] | | |
| f47-2.aa | gi\|3095107 | (AF046999) 2.9-9 lipoprotein [Borrelia | 328 | 3.80E−40 |
| | | burgdorferi] | | |
| f47-2.aa | gnl\|PID\|e268242 | surface-exposed lipoprotein [Borrelia | 320 | 1.70E−39 |
| | | garinii] | | |
| f47-2.aa | gi\|1209837 | lipoprotein [Borrelia burgdorferi] | 210 | 4.80E−29 |
| f47-2.aa | gi\|2121280 | (AF000270) lipoprotein [Borrelia | 205 | 1.10E−27 |
| | | burgdorferi] >gi\|3095109 | | |
| f47-2.aa | gi\|3095105 | (AF046998) 2.9-8 lipoprotein [Borrelia | 217 | 6.30E−25 |
| | | burgdorferi] | | |
| f47-2.aa | gi\|1209873 | lipoprotein [Borrelia burgdorferi] | 113 | 2.40E−11 |
| f477.aa | gi\|2688350 | (AE001149) fructose-bisphosphate | 1506 | 3.60E−202 |
| | | aldolase (fba) [Borrelia | | |
| f477.aa | gi\|882454 | fructose 1,6-bisphosphate aldolase | 651 | 1.10E−131 |
| | | [Escherichia coli] >gi\|41423 | | |
| f477.aa | gi\|2708661 | (AF037440) fructose 1,6-bisphosphate | 593 | 1.40E−124 |
| | | aldolase [Edwardsiella | | |
| f477.aa | gi\|1573507 | fructose-bisphosphate aldolase (fba) | 560 | 8.50E−120 |
| | | [Haemophilus influenzae] | | |
| f477.aa | gi\|671841 | fructose 1,6-bisphosphate aldolase | 856 | 3.80E−113 |
| | | [Campylobacter jejuni] | | |
| f477.aa | gnl\|PID\|d1004756 | fructose 1,6-bisphosphate aldolase | 749 | 1.70E−98 |
| | | [Schizosaccharomyces | | |
| f477.aa | gi\|433637 | yeast fructose-bisphate-aldolase | 459 | 1.20E−92 |
| | | [Saccharomyces cerevisiae] >gi\|3696 | | |
| f477.aa | gnl\|PID\|e190134 | fructose-1,6-bisphosphate aldolase | 701 | 6.30E−92 |
| | | [Euglena gracilis] | | |
| f477.aa | gi\|1334980 | fructose 1,6 bisphosphate-aldolase | 647 | 1.50E−84 |
| | | [Neurospora crassa] | | |
| f477.aa | gi\|40495 | fructose-bisphosphate aldolase | 204 | 6.80E−37 |
| | | [Corynebacterium glutamicum] | | |
| f477.aa | gnl\|PID\|e315480 | Fba [Mycobacterium tuberculosis] | 207 | 1.50E−35 |
| f477.aa | gi\|1045692 | fructose-bisphosphate aldolase | 108 | 2.10E−23 |
| | | [Mycoplasma genitalium] | | |
| f477.aa | gnl\|PID\|d1003809 | hypothetical protein [Bacillus subtilis] | 102 | 2.70E−15 |
| | | >gnl\|PID\|e1184692 | | |
| f488.aa | gi\|2688338 | (AE001148) DNA gyrase, subunit A | 3222 | 0 |
| | | (gyrA) [Borrelia burgdorferi] | | |
| f488.aa | gi\|1790876 | DNA gyrase subunit A [Clostridium | 822 | 1.80E−171 |
| | | acetobutylicum] | | |
| f488.aa | gi\|2650163 | (AE001072) DNA gyrase, subunit A | 483 | 1.10E−162 |
| | | (gyrA) [Archaeoglobus fulgidus] | | |
| f488.aa | gi\|40019 | ORF 821 (aa 1-821) [Bacillus subtilis] | 836 | 6.10E−159 |
| | | >gnl\|PID\|d1005785 A subunit of | | |
| f488.aa | gi\|459929 | gyrase A subunit [Pseudomonas | 418 | 7.00E−155 |
| | | aeruginosa] | | |
| | | >sp\|P48372\|GYRA_PSEAE DNA | | |
| f488.aa | gi\|144206 | DNA gyrase A [Campylobacter jejuni] | 508 | 7.50E−154 |
| | | >pir\|A48902\|A48902 DNA gyrase | | |
| f488.aa | gi\|466275 | gyrase A [Mycobacterium tuberculosis] | 395 | 3.50E−152 |
| | | >sp\|Q07702\|GYRA_MYCTU DNA | | |
| f488.aa | gnl\|PID\|e266924 | GyrA [Mycobacterium tuberculosis] | 395 | 2.00E−151 |
| f488.aa | gi\|43485 | DNA gyrase A subunit [Haloferax] | 275 | 6.10E−151 |
| | | >pir\|S30571\|S30571 DNA | | |
| | | topoisomerase | | |
| f488.aa | gnl\|PID\|d1025098 | (AB010081) A subunit of DNA gyrase | 549 | 1.20E−150 |
| | | [Bacillus sp.] | | |
| f488.aa | gnl\|PID\|e214031 | DNA gyrase subunit A [Mycobacterium | 388 | 5.90E−150 |
| | | smegmatis] | | |
| f488.aa | gi\|2731385 | DNA gyrase [Serratia marcescens] | 378 | 6.00E−148 |
| f488.aa | gnl\|PID\|e137038 | DNA topoisomerase (ATP-hydrolysing) | 388 | 7.30E−147 |
| | | [Mycobacterium smegmatis] | | |
| f488.aa | gi\|41634 | gyrA gene product (AA 1-875) | 383 | 2.40E−146 |
| | | [Escherichia coli] >gi\|41636 DNA | | |
| | | gyrase | | |
| f488.aa | gi\|497648 | DNA gyrase subunit A [Mycoplasma | 514 | 5.20E−146 |
| | | genitalium] | | |
| f49-2.aa | gi\|2039282 | putative vls recombination cassette Vls3 | 943 | 2.30E−120 |
| | | [Borrelia burgdorferi] | | |
| f49-2.aa | gi\|2547241 | vmp-like sequence protein VlsE | 434 | 4.10E−106 |
| | | [Borrelia burgdorferi] | | |
| f49-2.aa | gi\|2039324 | vmp-like sequence protein VlsE | 458 | 3.00E−104 |
| | | [Borrelia burgdorferi] | | |
| f49-2.aa | gi\|2039281 | putative vls recombination cassette Vls2 | 793 | 1.80E−100 |
| | | [Borrelia burgdorferi] | | |
| f49-2.aa | gi\|2039283 | putative vls recombination cassette Vls4 | 729 | 4.60E−92 |
| | | [Borrelia burgdorferi] | | |
| f49-2.aa | gi\|2039308 | vmp-like sequence protein VlsE | 652 | 1.40E−88 |
| | | [Borrelia burgdorferi] | | |
| f49-2.aa | gi\|2039288 | putative vls recombination cassette Vls9 | 352 | 1.80E−88 |
| | | [Borrelia burgdorferi] | | |
| f49-2.aa | gi\|2039332 | vmp-like sequence protein VlsE | 550 | 4.40E−88 |
| | | [Borrelia burgdorferi] | | |
| f49-2.aa | gi\|2039328 | vmp-like sequence protein VlsE | 629 | 1.50E−85 |
| | | [Borrelia burgdorferi] | | |
| f49-2.aa | gi\|2039336 | vmp-like sequence protein VlsE | 460 | 1.40E−82 |
| | | [Borrelia burgdorferi] | | |
| f49-2.aa | gi\|2039318 | vmp-like sequence protein VlsE | 367 | 6.20E−82 |
| | | [Borrelia burgdorferi] | | |
| f49-2.aa | gi\|2039320 | vmp-like sequence protein VlsE | 449 | 1.80E−77 |
| | | [Borrelia burgdorferi] | | |
| f49-2.aa | gi\|2483796 | VlsE1 [Borrelia burgdorferi] | 497 | 8.20E−76 |
| f49-2.aa | gi\|2039326 | vmp-like sequence protein VlsE | 427 | 2.50E−64 |
| | | [Borrelia burgdorferi] | | |
| f49-2.aa | gi\|2039291 | putative vls recombination cassette | 409 | 1.30E−47 |
| | | Vls13 [Borrelia burgdorferi] | | |
| f494.aa | gi\|2688346 | (AE001148) B. burgdorferi predicted | 547 | 8.20E−74 |
| | | coding region BB0428 [Borrelia | | |
| f5-14.aa | gi\|2627268 | ErpM [Borrelia burgdorferi] | 1836 | 2.60E−236 |
| f5-14.aa | gi\|1373144 | ErpD [Borrelia burgdorferi] | 543 | 4.40E−87 |
| f5-14.aa | gi\|2627270 | ErpJ [Borrelia burgdorferi] | 503 | 4.30E−83 |
| f5-14.aa | gi\|1699017 | ErpB2 [Borrelia burgdorferi] | 503 | 2.60E−82 |
| | | >gi\|1373133 ErpB [Borrelia | | |
| f5-14.aa | gi\|2444428 | (AF020657) ErpX protein [Borrelia | 399 | 9.30E−57 |
| | | burgdorferi] | | |
| f5-14.aa | gnl\|PID\|e329895 | (AJ000496) cyclic nucleotide-gated | 228 | 1.50E−20 |
| | | channel beta subunit | | |
| f5-14.aa | gnl\|PID\|d1012343 | gene required for phosphoylation of | 203 | 8.70E−18 |
| | | oligosaccharides/has | | |
| f5-14.aa | gi\|2246532 | ORF 73, contains large complex repeat | 197 | 3.30E−17 |
| | | CR 73 [Kaposi's | | |
| f5-14.aa | gi\|1633572 | Herpesvirus saimiri ORF73 homolog | 192 | 1.20E−16 |
| | | [Kaposi's sarcoma-associated | | |
| f5-14.aa | gi\|3068583 | (AF000580) Rep-like [Dictyostelium | 197 | 3.60E−16 |
| | | discoideum] | | |
| f5-14.aa | gi\|2690100 | (AE000789) B. burgdorferi predicted | 183 | 2.90E−15 |
| | | coding region BBI16 [Borrelia | | |
| f5-14.aa | gi\|1825739 | No definition line found | 168 | 1.60E−14 |
| | | [Caenorhabditis elegans] | | |
| f5-14.aa | gi\|3044185 | (AF056936) mature parasite-infected | 166 | 2.00E−14 |
| | | erythrocyte surface antigen | | |
| f5-14.aa | gnl\|PID\|e349084 | E02A10.2 [Caenorhabditis elegans] | 176 | 2.30E−14 |
| f5-14.aa | gi\|1051120 | outer surface protein G [Borrelia | 157 | 3.30E−12 |
| | | burgdorferi] >gi\|1373118 ErpG | | |
| f5-15.aa | gi\|2627267 | ErpL [Borrelia burgdorferi] | 1152 | 4.40E−147 |
| f5-15.aa | gi\|1197833 | Bbk2.11 [Borrelia burgdorferi] | 856 | 3.30E−108 |
| | | >pir\|S70531\|S70531 bbk2.11 protein | | |
| f5-15.aa | gi\|896042 | OspF [Borrelia burgdorferi] | 325 | 1.00E−72 |
| | | >pir\|S70532\|S70532 outer surface | | |
| | | protein | | |
| f5-15.aa | gi\|1707281 | putative Outer membrane protein | 323 | 1.80E−72 |
| | | [Borrelia burgdorferi] | | |
| f5-15.aa | gi\|1707287 | putative outer membrane protein | 322 | 6.60E−70 |
| | | [Borrelia burgdorferi] | | |
| f5-15.aa | gi\|466482 | outer surface protein F [Borrelia | 448 | 6.80E−68 |
| | | burgdorferi] >pir\|I40287\|I40287 | | |
| f5-15.aa | gi\|1707290 | putative outer surface protein [Borrelia | 290 | 1.90E−52 |
| | | burgdorferi] | | |
| f5-15.aa | gi\|1663633 | ErpK [Borrelia burgdorferi] | 172 | 8.70E−43 |
| f5-15.aa | gi\|896038 | BbK2.10 precursor [Borrelia | 153 | 1.10E−42 |
| | | burgdorferi] >pir\|S70534\|S70534 | | |
| | | bbK2.10 | | |
| f5-15.aa | gi\|896040 | BbK2.10 precursor [Borrelia | 124 | 4.30E−39 |
| | | burgdorferi] >pir\|S70533\|S70533 | | |
| | | bbK2.10 | | |
| f5-15.aa | gi\|1051120 | outer surface protein G [Borrelia | 105 | 3.10E−23 |
| | | burgdorferi] >gi\|1373118 ErpG | | |
| f5-15.aa | gi\|1373144 | ErpD [Borrelia burgdorferi] | 103 | 1.10E−14 |
| f50.aa | gi\|2688754 | (AE001179) B. burgdorferi predicted | 2651 | 0 |
| | | coding region BB0806 [Borrelia | | |
| f502.aa | gi\|2688313 | (AE001146) sensory transduction | 7570 | 0 |
| | | histidine kinase, putative | | |
| f502.aa | gnl\|PID\|d1025877 | (AB006363) homologue of histidine | 296 | 3.80E−58 |
| | | kinase [Candida albicans] | | |
| f502.aa | gi\|1354473 | Os-1p [Neurospora crassa] | 275 | 3.30E−57 |
| f502.aa | gi\|1679757 | two-component histidine kinase CHK-1 | 382 | 4.20E−57 |
| | | [Glomerella cingulata] | | |
| f502.aa | gi\|1262208 | Nik-1 [Neurospora crassa] >gi\|1262210 | 273 | 6.30E−57 |
| | | Nik-1 [Neurospora crassa] | | |
| f502.aa | gi\|2460283 | (AF024654) hybrid histidine kinase | 273 | 3.90E−55 |
| | | DHKB [Dictyostelium discoideum] | | |
| f502.aa | gnl\|PID\|d1017789 | sensory transduction histidine kinase | 288 | 8.50E−54 |
| | | [Synechocystis sp. ] | | |
| f502.aa | gi\|2623815 | (AF030352) two component sensor | 252 | 4.00E−52 |
| | | [Pseudomonas aeruginosa] | | |
| f502.aa | gi\|939724 | putative sensor kinase; regulatory | 252 | 1.80E−50 |
| | | protein for production of | | |
| f502.aa | gi\|151329 | regulatory protein [Pseudomonas | 248 | 1.20E−49 |
| | | syringae] >sp\|P48027\|LEMA_PSESY | | |
| f502.aa | pir\|B41863\|B41863 | two-component regulatory protein lemA - | 248 | 1.30E−49 |
| | | Pseudomonas syringae | | |
| f502.aa | gnl\|PID\|d1018725 | sensory transduction histidine kinase | 252 | 2.10E−49 |
| | | [Synechocytis sp. ] | | |
| f502.aa | gnl\|PID\|d1002185 | sensor-regulator protein [Escherichia | 262 | 6.20E−49 |
| | | coli] >gi\|1789149 | | |
| f502.aa | gi\|463195 | pectate lyase [Pseudomonas viridiflava] | 247 | 7.50E−49 |
| f502.aa | gnl\|PID\|d1018731 | sensory transduction histidine kinase | 244 | 1.00E−48 |
| | | [Synechocystis sp. ] | | |
| f51-2.aa | gi\|2444428 | (AF020657) ErpX protein [Borrelia | 1755 | 2.20E−227 |
| | | burgdorferi] | | |
| f51-2.aa | gi\|2627268 | ErpM [Borrelia burgdorferi] | 399 | 3.20E−57 |
| f51-2.aa | gi\|1373144 | ErpD [Borrelia burgdorferi] | 282 | 2.20E−50 |
| f51-2.aa | gi\|2627270 | ErpJ [Borrelia burgdorferi] | 271 | 6.00E−34 |
| f51-2.aa | gi\|1699017 | ErpB2 [Borrelia burgdorferi] | 271 | 2.50E−33 |
| | | >gi\|1373133 ErpB [Borrelia | | |
| f51-2.aa | gi\|1051120 | outer surface protein G [Borrelia | 109 | 3.70E−22 |
| | | burgdoferi] >gi\|1373118 ErpG | | |
| f51-2.aa | gnl\|PID\|d1012343 | gene required for phosphoylation of | 203 | 5.40E−18 |
| | | oligosaccharides/has | | |
| f51-2.aa | gi\|1707287 | putative outer membrane protein | 111 | 7.50E−18 |
| | | [Borrelia burgdoferi] | | |
| f51-2.aa | gi\|896042 | OspF [Borrelia burgdorferi] | 111 | 2.10E−17 |
| | | >pir\|S70532\|S70532 outer surface | | |
| | | protein | | |
| f51-2.aa | gi\|1707281 | putative outer membrane protein | 111 | 7.50E−17 |
| | | [Borrelia burgdorferi] | | |
| f51-2.aa | gnl\|PID\|e329895 | (AJ000496) cyclic nucleotide-gated | 198 | 1.60E−16 |
| | | channel beta subunit | | |
| f51-2.aa | gi\|2246532 | ORF 73, contains large complex repeat | 176 | 2.30E−14 |
| | | CR 73 [Kaposi's | | |
| f51-2.aa | gnl\|PID\|e349084 | E02A10.2 [Caenorhabditis elegans] | 170 | 2.10E−13 |
| f51-2.aa | gi\|160299 | glutamic acid-rich protein [Plasmodium | 157 | 7.30E−12 |
| | | falciparum] | | |
| f516.aa | gi\|2688326 | (AE001146) B. burgdorferi predicted | 1096 | 2.00E−150 |
| | | coding region BB0409 [Borrelia | | |
| f517.aa | gi\|2688320 | (AE001146) PTS system, fructose- | 1637 | 2.30E−228 |
| | | specific IIABC component (fruA-1) | | |
| f517.aa | gnl\|PID\|e1183221 | similar to fructose phosphotransferase | 256 | 4.00E−88 |
| | | system enzyme II | | |
| f517.aa | gi\|396296 | similar to phosphotransferase system | 305 | 9.10E−86 |
| | | enzyme II [Escherichia coli] | | |
| f517.aa | gi\|405893 | fructose-specific IIBC component | 224 | 4.30E−84 |
| | | [Escherichia coli] >gi\|450372 | | |
| f517.aa | gi\|151932 | fructose enzyme II [Rhodobacter | 222 | 4.70E−79 |
| | | capsulatus] >gi\|46021 fructose | | |
| f517.aa | gi\|1573422 | fructose-permease IIBC component | 225 | 6.90E−69 |
| | | (fruA) [Haemophilus influenzae] | | |
| f517.aa | gi\|2688554 | (AE001164) PTS system, fructose- | 236 | 8.20E−66 |
| | | specific IIABC component (fruA-2) | | |
| f517.aa | gnl\|PID\|e1185030 | phosphotransferase system (PTS) | 195 | 2.80E−65 |
| | | fructose-specific enzyme IIBC | | |
| f517.aa | gi\|155369 | PTS enzyme-II fructose [Xanthomonas | 187 | 8.10E−62 |
| | | campestris] >pir\|B40944\|B40944 | | |
| f517.aa | gi\|305003 | similar to fructose-specific | 145 | 1.90E−39 |
| | | phosphotransferase enzyme II | | |
| f517.aa | gnl\|PID\|d1011544 | HrsA [Escherichia coli] >gi\|1786951 | 148 | 2.80E−39 |
| | | (AE000176) | | |
| f517.aa | gi\|1813488 | phosphotransferase enzyme II [Bacillus | 226 | 3.90E−39 |
| | | firmus] | | |
| f517.aa | gi\|757734 | fruA gene product [Bacillus | 177 | 2.50E−36 |
| | | amyloliquefaciens] >pir\|S59965\|S59965 | | |
| f517.aa | gnl\|PID\|d1016984 | PTS SYSTEM, FRUCTOSE-SPECIFIC | 173 | 1.10E−34 |
| | | IIBC COMPONENT (EIIBC-FRU) | | |
| f517.aa | gi\|1673731 | (AE000010) Mycoplasma pneumoniae, | 143 | 9.00E−33 |
| | | fructose-permease IIBC component; | | |
| f519.aa | gi\|2688327 | (AE001146) B. burgdorferi predicted | 1060 | 5.70E−145 |
| | | coding region BB0406 [Borrelia | | |
| f519.aa | gi\|2688328 | (AE001146) B. burgdorferi predicted | 261 | 1.20E−47 |
| | | coding region BB0405 [Borrelia | | |
| f520.aa | gi\|2688328 | (AE001146) B. burgdorferi predicted | 1022 | 3.90E−138 |
| | | coding region BB0405 [Borrelia | | |
| f520.aa | gi\|2688327 | (AE001146) B. burgdorferi predicted | 261 | 4.00E−47 |
| | | coding region BB0406 [Borrelia | | |
| f523.aa | gi\|2688300 | (AE001145) glutamate transporter, | 2007 | 9.90E−284 |
| | | putative [Borrelia burgdorferi] | | |
| f526.aa | gi\|2688309 | (AE001145) B. burgdorferi predicted | 1087 | 1.60E−145 |
| | | coding region BB0399 [Borrelia | | |
| f527.aa | gi\|2688310 | (AE001145) B. burgdorferi predicted | 1814 | 7.60E−249 |
| | | coding region BB0398 [Borrelia | | |
| f541.aa | gi\|508421 | antigen P39 [Borrelia burgdorferi] | 1706 | 5.40E−230 |
| | | >gi\|2688281 (AE001143) basic | | |
| f541.aa | gi\|1753225 | BmpA protein [Borrelia burgdorferi] | 1698 | 6.80E−229 |
| f541.aa | gnl\|PID\|e1172833 | bmpA(p39, ORF1) [Borrelia | 1695 | 1.70E−228 |
| | | burgdorferi] | | |
| f541.aa | gnl\|PID\|e1172835 | membrane protein A [Borrelia | 1642 | 3.40E−221 |
| | | burgdorferi] >gi\|516592 membrane | | |
| f541.aa | gnl\|PID\|e1172834 | membrane protein A [Borrelia | 1638 | 1.20E−220 |
| | | burgdorferi] | | |
| f541.aa | gnl\|PID\|e1172828 | bmpA(p39, ORF1) [Borrelia | 1551 | 1.00E−208 |
| | | burgdorferi] | | |
| f541.aa | gnl\|PID\|e1172829 | membrane protein A [Borrelia afzelii] | 1502 | 5.60E−202 |
| f541.aa | gnl\|PID\|e1172831 | membrane protein A [Borrelia afzelii] | 1499 | 1.40E−201 |
| f541.aa | gnl\|PID\|e1172837 | membrane protein A [Borrelia garinii] | 1496 | 3.70E−201 |
| f541.aa | gnl\|PID\|e1172830 | membrane protein A [Borrelia afzelii] | 1493 | 9.60E−201 |
| f541.aa | gnl\|PID\|e1172838 | membrane protein A [Borrelia garinii] | 1488 | 4.60E−200 |
| f541.aa | gnl\|PID\|e237214 | membrane protein A [Borrelia garinii] | 1216 | 1.20E−162 |
| f541.aa | gnl\|PID\|e237209 | membrane protein A [Borrelia garinii] | 1211 | 5.90E−162 |
| f541.aa | gnl\|PID\|e237236 | membrane protein A [Borrelia garinii] | 1098 | 2.00E−146 |
| f541.aa | gi\|2688282 | (AE001143) basic membrane protein B | 518 | 1.20E−123 |
| | | (bmpB) [Borrelia burgdorferi] | | |
| f542.aa | gi\|508422 | [Borrelia burgdorferi immunodominant | 711 | 1.70E−95 |
| | | antigen P39 gene, complete | | |
| f542.aa | gi\|2688282 | (AE001143) basic membrane protein B | 711 | 1.70E−95 |
| | | (bmpB) [Borrelia burgdorferi] | | |
| f542.aa | gi\|551744 | membrane lipoprotein [Borrelia | 708 | 8.60E−95 |
| | | burgdorferi] | | |
| f542.aa | gnl\|PID\|e1172836 | bmpB(p39, ORF2) [Borrelia | 699 | 8.20E−94 |
| | | burgdorferi] | | |
| f542.aa | gnl\|PID\|e1172832 | bmpB(p39, ORF2) [Borrelia afzelii] | 634 | 1.00E−84 |
| f542.aa | gnl\|PID\|e1172839 | bmpB(p39, ORF2) [Borrelia garinii] | 613 | 9.20E−82 |
| f542.aa | gnl\|PID\|e237209 | membrane protein A [Borrelia garinii] | 153 | 1.70E−32 |
| f542.aa | gnl\|PID\|e1172828 | bmpA(p39, ORF1) [Borrelia | 144 | 3.80E−32 |
| | | burgdorferi] | | |
| f542.aa | gnl\|PID\|e237214 | membrane protein A [Borrelia garinii] | 153 | 2.00E−31 |
| f542.aa | gi\|1753225 | BmpA protein [Borrelia burgdorferi] | 155 | 2.80E−31 |
| f542.aa | gnl\|PID\|e1172833 | bmpA(p39, ORF1) [Borrelia | 155 | 2.80E−31 |
| | | burgdorferi] | | |
| f542.aa | gi\|508421 | antigen P39 [Borrelia burgdorferi] | 155 | 2.80E−31 |
| | | >gi\|2688281 (AE001143) basic | | |
| f542.aa | gnl\|PID\|e1172837 | membrane protein A [Borrelia garinii] | 156 | 1.00E−30 |
| f542.aa | gnl\|PID\|e1172829 | membrane protein A [Borrelia afzelii] | 144 | 1.90E−30 |
| f542.aa | gnl\|PID\|e1172830 | membrane protein A [Borrelia afzelii] | 144 | 2.70E−30 |
| f544.aa | gi\|2688284 | (AE001143) Mg2+ transport protein | 860 | 4.20E−119 |
| | | (mgtE) [Borrelia burgdorferi] | | |
| f544.aa | gi\|1753228 | MgtE [Borrelia burgdorferi] | 855 | 2.20E−118 |
| f544.aa | gi\|619724 | MgtE [Bacillus firmus] | 176 | 3.70E−37 |
| | | >pir\|I40201\|I40201 mgtE protein - | | |
| | | Bacillus | | |
| f544.aa | gi\|780282 | extended ORF of mgtE gene; | 182 | 1.30E−34 |
| | | transcription from this start point is | | |
| f544.aa | gnl\|PID\|e315479 | unknown [Mycobacterium tuberculosis] | 183 | 4.50E−31 |
| f544.aa | gnl\|PID\|d1018132 | Mg2+ transporter [Synechocystis sp. ] | 165 | 4.60E−31 |
| | | >pir\|S77552\|S77552 Mg2+ | | |
| f544.aa | gnl\|PID\|e1181529 | (AJ002571) YkoK [Bacillus subtilis] | 142 | 2.30E−30 |
| | | >gnl\|PID\|e1183350 similar | | |
| f544.aa | gi\|2621701 | (AE000843) Mg2+ transporter | 142 | 3.20E−21 |
| | | [Methanobacterium | | |
| | | thermoautotrophicum] | | |
| f545.aa | gi\|2688284 | (AE001143) Mg2+ transport protein | 860 | 4.20E−119 |
| | | (mgtE) [Borrelia burgdorferi] | | |
| f545.aa | gi\|1753228 | MgtE [Borrelia burgdorferi] | 855 | 2.20E−118 |
| f545.aa | gi\|619724 | MgtE [Bacillus firmus] | 176 | 3.70E−37 |
| | | >pir\|I40201\|I40201 mgtE protein - | | |
| | | Bacillus | | |
| f545.aa | gi\|780282 | extended ORF of mgtE gene; | 182 | 1.30E−34 |
| | | transcription from this start point is | | |
| f545.aa | gnl\|PID\|e315479 | unknown [Mycobacterium tuberculosis] | 183 | 4.50E−31 |
| f545.aa | gnl\|PID\|d1018132 | Mg2+ transporter [Synechocystis sp. ] | 165 | 4.60E−31 |
| | | >pir\|S77552\|S77552 Mg2+ | | |
| f545.aa | gnl\|PID\|e1181529 | (AJ002571) YkoK [Bacillus subtilis] | 142 | 2.30E−30 |
| | | >gnl\|PID\|e1183350 similar | | |
| f545.aa | gi\|2621701 | (AE000843) Mg2+ transporter | 142 | 3.20E−21 |
| | | [Methanobacterium | | |
| | | thermoautotrophicum] | | |
| f561.aa | gi\|49245 | lipoprotein [Borrelia burgdorferi] | 1000 | 1.30E−132 |
| | | >gi\|2688271 (AE001142) lipoprotein | | |
| f561.aa | gi\|495738 | P22 [Borrelia burgdorferi] | 982 | 3.70E−130 |
| f577.aa | gi\|2688261 | (AE001141) B. burgdorferi predicted | 1930 | 4.00E−264 |
| | | coding region BB0352 [Borrelia | | |
| f584.aa | gi\|2688246 | (AE001140) B. burgdorferi predicted | 1094 | 4.10E−147 |
| | | coding region BB0346 [Borrelia | | |
| f596.aa | gi\|2688241 | (AE001140) P26 [Borrelia burgdorferi] | 1322 | 1.20E−180 |
| | | >pir\|G70141\|G70141 P26 | | |
| f596.aa | gi\|2281465 | (AF000366) P26 [Borrelia burgdorferi] | 1010 | 5.90E−137 |
| | | >gi\|2281465 (AF000366) P26 | | |
| f598.aa | gi\|2281462 | (AF000366) oligopeptide permease | 652 | 1.20E−85 |
| | | homolog D [Borrelia burgdorferi] | | |
| f598.aa | gi\|143607 | sporulation protein [Bacillus subtilis] | 372 | 1.20E−45 |
| f598.aa | gnl\|PID\|e1183166 | oligopeptide ABC transporter (ATP- | 372 | 1.20E−45 |
| | | binding protein) [Bacillus | | |
| f598.aa | gi\|1574676 | oligopeptide transport ATP-binding | 344 | 6.70E−42 |
| | | protein (oppD) [Haemophilus | | |
| f598.aa | gi\|677943 | AppD [Bacillus subtilis] | 344 | 8.00E−42 |
| | | >gnl\|PID\|e1183156 oligopeptide ABC | | |
| f598.aa | gi\|1787051 | (AE000185) o612; 48 pct identical (33 | 346 | 2.50E−41 |
| | | gaps) to 525 residues from | | |
| f598.aa | gi\|47346 | AmiE protein [Streptococcus | 338 | 1.10E−40 |
| | | pneumoniae] >pir\|S11152\|S11152 amiE | | |
| f598.aa | gi\|47805 | Opp D (AA1-335) [Salmonella | 332 | 5.70E−40 |
| | | typhimurium] | | |
| | | >sp\|P04285\|OPPD_SALTY | | |
| f598.aa | pir\|A03413\|QREBOT | oligopeptide transport protein oppD - | 332 | 5.70E−40 |
| | | Salmonella typhimurium | | |
| f598.aa | gi\|1787499 | (AE000223) oligopeptide transport | 332 | 5.90E−40 |
| | | ATP-binding protein OppD | | |
| f598.aa | gnl\|PID\|d1015494 | Oligopeptide transport ATP-binding | 332 | 5.90E−40 |
| | | protein OppD. [Escherichia | | |
| f598.aa | gi\|495177 | ATP binding protein [Lactococcus | 331 | 8.40E−40 |
| | | lactis] >sp\|P50980\|OPPD_LACLC | | |
| f598.aa | gnl\|PID\|e187587 | oligopeptidepermease [Streptococcus | 331 | 1.10E−39 |
| | | pyogenes] | | |
| f598.aa | gi\|308850 | ATP binding protein [Lactococcus | 329 | 1.60E−39 |
| | | lactis] >pir\|A53290\|A53290 | | |
| f598.aa | gi\|2313399 | (AE000548) dipeptide ABC transporter, | 322 | 2.30E−39 |
| | | ATP-binding protein (dppD) | | |
| f6-21.aa | gi\|2281468 | (AF000948) OppAIV [Borrelia | 565 | 4.30E−73 |
| | | burgdorferi] >gi\|2689891 (AE000792) | | |
| f6-21.aa | gi\|2253286 | (AF005657) plasminogen binding | 315 | 1.20E−37 |
| | | protein [Borrelia burgdorferi] | | |
| f6-21.aa | gi\|2688228 | (AE001139) oligopeptide ABC | 314 | 1.60E−37 |
| | | transporter, periplasmic | | |
| f6-21.aa | gi\|2809544 | (AF043071) oligopeptide permease | 314 | 1.60E−37 |
| | | periplasmic binding protein | | |
| f6-21.aa | gi\|2281457 | (AF000366) oligopeptide permease | 314 | 1.60E−37 |
| | | homolog AI [Borrelia burgdorferi] | | |
| f6-21.aa | gi\|2688227 | (AE001139) oligopeptide ABC | 290 | 3.90E−34 |
| | | transporter, periplasmic | | |
| f6-21.aa | gi\|2281458 | (AF000366) oligopeptide permease | 290 | 3.90E−34 |
| | | homolog AII [Borrelia burgdorferi] | | |
| f6-21.aa | gi\|2281455 | (AF000365) oligopeptide permease | 279 | 9.90E−34 |
| | | homolog AV [Borrelia burgdorferi] | | |
| f6-21.aa | gi\|2690261 | (AE000790) oligopeptide ABC | 282 | 5.30E−33 |
| | | transporter, periplasmic | | |
| f6-21.aa | gi\|1616644 | P30 [Borrelia burgdorferi] | 271 | 6.70E−32 |
| f6-21.aa | gi\|2688226 | (AE001139) oligopeptide ABC | 268 | 5.00E−31 |
| | | transporter, periplasmic | | |
| f6-21.aa | gi\|2281459 | (AF000366) oligopeptide permease | 268 | 5.00E−31 |
| | | homolog AIII [Borrelia | | |
| f6-21.aa | gi\|2809546 | (AF043071) oligopeptide permease | 268 | 5.00E−31 |
| | | periplasmic binding protein | | |
| f6-21.aa | bbs\|161785 | 60 kda antigen [Borrelia coriaceae, | 255 | 2.90E−30 |
| | | C053, ATCC 4338, Peptide, 514 | | |
| f6-21.aa | gi\|2983834 | (AE000740) transporter (extracellular | 154 | 3.50E−14 |
| | | solute binding protein family | | |
| f6-27.aa | gi\|2689911 | (AE000792) B. burgdorferi predicted | 1773 | 7.30E−240 |
| | | coding region BBB09 [Borrelia | | |
| f6-5.aa | gi\|2689905 | (AE000792) B. burgdorferi predicted | 932 | 7.50E−126 |
| | | coding region BBB27 [Borrelia | | |
| f600.aa | gi\|2281461 | (AF000366) oligopeptide permease | 731 | 1.40E−100 |
| | | homolog C [Borrelia burgdorferi] | | |
| f600.aa | gi\|2688244 | (AE001140) oligopeptide ABC | 731 | 1.40E−100 |
| | | transporter, permease protein (oppC-1) | | |
| f600.aa | gi\|143606 | sporulation protein [Bacillus subtilis] | 372 | 5.00E−48 |
| | | >pir\|C38447\|C38447 | | |
| f600.aa | gi\|40007 | OppC gene product [Bacillus subtilis] | 372 | 5.00E−48 |
| | | >gnl\|PID\|e1183165 oligopeptide | | |
| f600.aa | gi\|1574677 | oligopeptide transport system permease | 372 | 7.30E−48 |
| | | protein (oppC)C [Haemophilus | | |
| f600.aa | gi\|47804 | Opp C (AA1-301) [Salmonella | 366 | 4.20E−47 |
| | | typhimurium] >pir\|C29333\|QREBOC | | |
| f600.aa | gnl\|PID\|d1015493 | Oligopeptide transport system permease | 366 | 4.20E−47 |
| | | protein OppC. | | |
| f600.aa | gnl\|PID\|e1181495 | (AJ002571) DppC [Bacillus subtilis] | 267 | 1.70E−42 |
| | | >gnl\|PID\|e1183314 | | |
| f600.aa | gi\|1732315 | transport system permease homolog | 335 | 5.30E−42 |
| | | [Listeria monocytogenes] | | |
| f600.aa | gi\|580851 | dciAC [Bacillus subtilis] | 258 | 1.50E−40 |
| | | >sp\|P26904\|DPPC_BACSU | | |
| | | DIPEPTIDE TRANSPORT | | |
| f600.aa | gnl\|PID\|d1011164 | oligopeptide transport system permease | 240 | 2.50E−39 |
| | | protein [Synechocystis | | |
| f600.aa | gi\|677947 | AppC [Bacillus subtilis] | 236 | 2.80E−37 |
| | | >gnl\|PID\|e1183160 oligopeptide ABC | | |
| f600.aa | gi\|1813497 | dipeptide transporter protein dppC | 281 | 1.20E−35 |
| | | [Bacillus firmus] | | |
| f600.aa | sp\|Q10623\|Y021_MYCTU | PUTATIVE PEPTIDE TRANSPORT | 290 | 1.50E−35 |
| | | PERMEASE PROTEIN CY373.01C. | | |
| f600.aa | gi\|1532201 | BldKA [Streptomyces coelicolor] | 291 | 1.60E−35 |
| f603.aa | gi\|2281460 | (AF000366) oligopeptide permease | 1522 | 5.80E−214 |
| | | homolog B [Borrelia burgdorferi] | | |
| f603.aa | gi\|1574678 | dipeptide transport system permease | 392 | 1.30E−100 |
| | | protein (dppB) [Haemophilus | | |
| f603.aa | gnl\|PID\|e1183164 | oligopeptide ABC transporter | 374 | 3.40E−96 |
| | | (permease) [Bacillus subtilis] | | |
| f603.aa | gi\|580897 | OppB gene product [Bacillus subtilis] | 373 | 6.60E−96 |
| | | >pir\|S15231\|B38447 | | |
| f603.aa | gi\|47803 | Opp B (AA1-306) [Salmonella | 371 | 6.70E−96 |
| | | typhimurium] >pir\|B29333\|QREBOB | | |
| f603.aa | gi\|1787497 | (AE000223) oligopeptide transport | 364 | 3.50E−95 |
| | | system permease protein OppB | | |
| f603.aa | gnl\|PID\|d1015492 | Oligopeptide transport system permease | 357 | 3.50E−94 |
| | | protein OppB. | | |
| f603.aa | gi\|580850 | dciAB [Bacillus subtilis] | 350 | 9.10E−90 |
| | | >gnl\|PID\|e1181494 (AJ002571) DppB | | |
| f603.aa | gi\|551726 | sporulation protein [Bacillus subtilis] | 374 | 2.40E−87 |
| | | >gi\|143605 sporulation | | |
| f603.aa | gi\|349226 | transmembrane protein [Escherichia | 293 | 9.60E−79 |
| | | coli] >gi\|466682 dppB | | |
| f603.aa | gi\|1787053 | (AE000185) o306; This 306 aa ORF is | 284 | 3.80E−77 |
| | | 46 pct identical (32 gaps) to | | |
| f603.aa | gi\|972895 | DppB [Haemophilus influenzae] | 301 | 2.50E−76 |
| | | >gi\|1574114 dipeptide transport system | | |
| f603.aa | gi\|2182646 | (AE000098) Y4tP [Rhizobium sp. | 294 | 9.10E−74 |
| | | NGR234] >sp\|Q53191\|Y4TP_RHISN | | |
| f603.aa | gi\|2983140 | (AE000692) transporter (OppBC | 169 | 2.30E−73 |
| | | family) [Aquifex aeolicus] | | |
| f603.aa | gi\|677946 | AppB [Bacillus subtilis] | 218 | 8.70E−73 |
| | | >gnl\|PID\|e1183159 oligopeptide ABC | | |
| f604.aa | gi\|2281459 | (AF000366) oligopeptide permease | 2818 | 0 |
| | | homolog AIII [Borrelia | | |
| f604.aa | gi\|2809546 | (AF043071) oligopeptide permease | 2818 | 0 |
| | | periplasmic binding protein | | |
| f604.aa | gi\|2688226 | (AE001139) oligopeptide ABC | 2823 | 0 |
| | | transporter, periplasmic | | |
| f604.aa | gi\|2688227 | (AE001139) oligopeptide ABC | 1738 | 1.40E−234 |
| | | transporter, periplasmic | | |
| f604.aa | gi\|2281458 | (AF000366) oligopeptide permease | 1731 | 1.30E−233 |
| | | homolog AII [Borrelia burgdorferi] | | |
| f604.aa | gi\|2281468 | (AF000948) OppAIV [Borrelia | 1675 | 3.60E−229 |
| | | burgdorferi] >gi\|2689891 (AE000792) | | |
| f604.aa | gi\|2688228 | (AE001139) oligopeptide ABC | 718 | 1.60E−204 |
| | | transporter, periplasmic | | |
| f604.aa | gi\|2809544 | (AF043071) oligopeptide permease | 718 | 3.00E−204 |
| | | periplasmic binding protein | | |
| f604.aa | gi\|2253286 | (AF005657) plasminogen binding | 718 | 4.10E−204 |
| | | protein [Borrelia burgdorferi] | | |
| f604.aa | gi\|2281457 | (AF000366) oligopeptide permease | 714 | 2.00E−203 |
| | | homolog AI [Borrelia burgdorferi] | | |
| f604.aa | bbs\|161785 | 60 kda antigen [Borrelia coriaceae, | 704 | 1.20E−190 |
| | | C053, ATCC 4338, Peptide, 514 | | |
| f604.aa | gi\|2281455 | (AF000365) oligopeptide permease | 1402 | 1.80E−188 |
| | | homolog AV [Borrelia burgdorferi] | | |
| f604.aa | gi\|2690261 | (AE000790) oligopeptide ABC | 1400 | 3.40E−188 |
| | | transporter, periplasmic | | |
| f604.aa | gi\|1616644 | P30 [Borrelia burgdorferi] | 858 | 4.90E−117 |
| f604.aa | gi\|47802 | Opp A (AA1-542) [Salmonella | 296 | 9.00E−114 |
| | | typhimurium] >gi\|47808 precursor | | |
| f606.aa | gi\|2281458 | (AF000366) oligopeptide permease | 2762 | 0 |
| | | homolog AII [Borrelia burgdorferi] | | |
| f606.aa | gi\|2688227 | (AE001139) oligopeptide ABC | 2774 | 0 |
| | | transporter, periplasmic | | |
| f606.aa | gi\|2281468 | (AF000948) OppAIV [Borrelia | 1817 | 6.50E−245 |
| | | burgdorferi] >gi\|2689891 (AE000792) | | |
| f606.aa | gi\|2809546 | (AF043071) oligopeptide permease | 1739 | 3.10E−234 |
| | | periplasmic binding protein | | |
| f606.aa | gi\|2688226 | (AE001139) oligopeptide ABC | 1738 | 4.20E−234 |
| | | transporter, periplasmic | | |
| f606.aa | gi\|2281459 | (AF000366) oligopeptide permease | 1733 | 2.00E−233 |
| | | homolog AIII [Borrelia | | |
| f606.aa | bbs\|161785 | 60 kda antigen [Borrelia coriaceae, | 762 | 1.70E−202 |
| | | C053, ATCC 4338, Peptide, 514 | | |
| f606.aa | gi\|2281455 | (AF000365) oligopeptide permease | 1456 | 1.80E−195 |
| | | homolog AV [Borrelia burgdorferi] | | |
| f606.aa | gi\|2690261 | (AE000790) oligopeptide ABC | 1454 | 3.30E−195 |
| | | transporter, periplasmic | | |
| f606.aa | gi\|2253286 | (AF005657) plasminogen binding | 751 | 2.00E−192 |
| | | protein [Borrelia burgdorferi] | | |
| f606.aa | gi\|2688228 | (AE001139) oligopeptide ABC | 751 | 2.70E−192 |
| | | transporter, periplasmic | | |
| f606.aa | gi\|2809544 | (AF043071) oligopeptide permease | 751 | 6.90E−192 |
| | | periplasmic binding protein | | |
| f606.aa | gi\|2281457 | (AF000366) oligopeptide permease | 748 | 2.40E−191 |
| | | homolog AI [Borrelia burgdorferi] | | |
| f606.aa | gi\|1616644 | P30 [Borrelia burgdorferi] | 1220 | 7.30E−163 |
| f606.aa | gi\|47802 | Opp A (AA1-542) [Salmonella | 285 | 7.80E−106 |
| | | typhimurium] >gi\|47808 precursor | | |
| f607.aa | gi\|2281457 | (AF000366) oligopeptide permease | 2694 | 0 |
| | | homolog AI [Borrelia burgdorferi] | | |
| f607.aa | gi\|2253286 | (AF005657) plasminogen binding | 2706 | 0 |
| | | protein [Borrelia burgdorferi] | | |
| f607.aa | gi\|2809544 | (AF043071) oligopeptide permease | 2708 | 0 |
| | | periplasmic binding protein | | |
| f607.aa | gi\|2688228 | (AE001139) oligopeptide ABC | 2714 | 0 |
| | | transporter, periplasmic | | |
| f607.aa | bbs\|161785 | 60 kda antigen [Borrelia coriaceae, | 1272 | 3.80E−242 |
| | | C053, ATCC 4338, Peptide, 514 | | |
| f607.aa | gi\|2809546 | (AF043071) oligopeptide permease | 718 | 1.40E−204 |
| | | periplasmic binding protein | | |
| f607.aa | gi\|2688226 | (AE001139) oligopeptide ABC | 718 | 3.60E−204 |
| | | transporter, periplasmic | | |
| f607.aa | gi\|2281459 | (AF000366) oligopeptide permease | 713 | 1.70E−203 |
| | | homolog AIII [Borrelia | | |
| f607.aa | gi\|2688227 | (AE001139) oligopeptide ABC | 751 | 2.40E−192 |
| | | transporter, periplasmic | | |
| f607.aa | gi\|2281458 | (AF000366) oligopeptide permease | 751 | 4.50E−192 |
| | | homolog AII [Borrelia burgdorferi] | | |
| f607.aa | gi\|2281468 | (AF000948) OppAIV [Borrelia | 806 | 8.40E−189 |
| | | burgdorferi] >gi\|2689891 (AE000792) | | |
| f607.aa | gi\|2690261 | (AE000790) oligopeptide ABC | 601 | 1.20E−144 |
| | | transporter, periplasmic | | |
| f607.aa | gi\|2281455 | (AF000365) oligopeptide permease | 600 | 1.60E−144 |
| | | homolog AV [Borrelia burgdorferi] | | |
| f607.aa | gi\|1616644 | P30 [Borrelia burgdorferi] | 709 | 5.40E−103 |
| f607.aa | gi\|47802 | Opp A (AA1-542) [Salmonella | 261 | 8.50E−69 |
| | | typhimurium] >gi\|47808 precursor | | |
| f611.aa | gi\|2688231 | (AE001139) B. burgdorferi predicted | 1907 | 1.10E−261 |
| | | coding region BB0325 [Borrelia | | |
| f617.aa | gi\|2688213 | (AE001138) conserved hypothetical | 1574 | 2.70E−226 |
| | | integral membrane protein | | |
| f617.aa | gi\|2649711 | (AE001042) ribose ABC transporter, | 109 | 7.00E−12 |
| | | permease protein (rbsC-1) | | |
| f631.aa | gi\|1165286 | FtsW [Borrelia burgdorferi] | 1820 | 4.00E−259 |
| | | >gi\|2688164 (AE001137) cell division | | |
| f631.aa | gnl\|PID\|e229592 | membrane protein [Borrelia | 1815 | 2.10E−258 |
| | | burgdorferi] >gnl\|PID\|e228289 ftsW | | |
| f631.aa | gi\|146039 | cell division protein [Escherichia coli] | 362 | 1.30E−60 |
| | | >gi\|40857 FtsW protein | | |
| f631.aa | gi\|580938 | internal open reading frame (AA 1-290) | 407 | 4.90E−55 |
| | | [Bacillus subtilis] | | |
| f631.aa | gnl\|PID\|e315953 | FtsW [Mycobacterium tuberculosis] | 412 | 5.40E−55 |
| | | >sp\|O06223\|FTWH_MYCTU | | |
| f631.aa | gi\|580937 | spoVE gene product (AA 1-366) | 410 | 2.90E−53 |
| | | [Bacillus subtilis] >gnl\|PID\|e1185111 | | |
| f631.aa | gi\|143657 | endospore forming protein [Bacillus | 405 | 1.20E−52 |
| | | subtilis] | | |
| f631.aa | gnl\|PID\|d1019002 | rod-shape-determining protein | 358 | 3.10E−51 |
| | | [Synechocystis sp. ] | | |
| f631.aa | gnl\|PID\|e1287793 | (AL022602) cell divisin protein FtsW | 396 | 6.70E−51 |
| | | [Mycobacterium leprae] | | |
| f631.aa | gi\|1016213 | strong sequence similarity to FtsW, | 349 | 1.00E−50 |
| | | RodA, and SpoV-E [Cyanophora | | |
| f631.aa | gi\|1574692 | cell division protein (ftsW) | 304 | 4.20E−50 |
| | | [Haemophilus influenzae] | | |
| f631.aa | gnl\|PID\|e1185075 | similar to cell-division protein [Bacillus | 281 | 1.80E−46 |
| | | subtilis] | | |
| f631.aa | gi\|1469784 | putative cell division protein ftsW | 247 | 1.60E−38 |
| | | [Enterococcus hirae] | | |
| f631.aa | gi\|1572976 | rod shape-determining protein (mreB) | 196 | 1.20E−37 |
| | | [Haemophilus influenzae] | | |
| f631.aa | gi\|147695 | rod-shape-determining protein | 194 | 5.00E−35 |
| | | [Escherichia coli] >gi\|1778551 | | |
| f635.aa | gi\|1165282 | orf7; Method: conceptual translation | 1166 | 1.00E−156 |
| | | supplied by author [Borrelia | | |
| f635.aa | gi\|1448949 | ORF 224; The predicted gene product | 621 | 2.80E−125 |
| | | showed weak homology with the | | |
| f647.aa | gi\|2688180 | (AE001137) flagellar protein (flbB) | 1032 | 1.00E−140 |
| | | [Borrelia burgdorferi] | | |
| f647.aa | gi\|1196323 | putative [Borrelia burgdorferi] | 1031 | 1.50E−140 |
| f647.aa | gi\|1165270 | orf19; Method: conceptual translation | 1019 | 7.10E−139 |
| | | supplied by author [Borrelia | | |
| f647.aa | gi\|2108242 | 22.5 K protein [Treponema pallidum] | 200 | 4.70E−24 |
| f65.aa | gi\|2688737 | (AE001178) B. burgdorferi predicted | 1095 | 8.10E−148 |
| | | coding region BB0792 [Borrelia | | |
| f653.aa | gi\|1165265 | MotB [Borrelia burgdorferi] | 1220 | 1.70E−164 |
| | | >gi\|1185054 flagellar motor apparatus | | |
| f653.aa | gi\|1399286 | MotB [Treponema phagedenis] | 168 | 5.80E−57 |
| f653.aa | gi\|2196896 | MotB [Treponema pallidum] | 179 | 1.30E−49 |
| f664.aa | gi\|1185062 | flagellar export protein [Borrelia | 1430 | 1.90E−199 |
| | | burgdorferi] | | |
| f664.aa | gi\|1165257 | FlhB [Borrelia burgdorferi] | 1430 | 1.90E−199 |
| | | >gi\|2688194 (AE001137) flagellar | | |
| f664.aa | gi\|1216382 | FlhB′ [Treponema pallidum] | 272 | 5.30E−64 |
| | | >pir\|PC4115\|PC4115 flagellar protein | | |
| f664.aa | gi\|395390 | flagellar biosynthetic protein [Bacillus | 433 | 1.30E−61 |
| | | subtilis] | | |
| f664.aa | gnl\|PID\|e1185229 | flagella-associated protein [Bacillus | 433 | 1.30E−61 |
| | | subtilis] | | |
| f664.aa | gi\|1147737 | third gene in fliQ operon; membrane | 353 | 1.70E−46 |
| | | protein homolog [Caulobacter | | |
| f664.aa | gi\|2313898 | (AE000589) flagellar biosynthetic | 203 | 1.20E−44 |
| | | protein (flhB) [Helicobacter | | |
| f664.aa | gi\|2984250 | (AE000768) flagellar biosynthetic | 319 | 3.00E−44 |
| | | protein FlhB [Aquifex aeolicus] | | |
| f664.aa | gi\|2459702 | FlhB [Agrobacterium tumefaciens] | 347 | 6.20E−44 |
| f664.aa | gi\|793892 | flhB [Yersinia enterocolitica] | 330 | 1.30E−39 |
| | | >pir\|S54213\|S54213 flhB protein - | | |
| f664.aa | gnl\|PID\|d1016420 | Flagellar biosynthetic protein FlhB. | 325 | 2.20E−39 |
| | | [Escherichia coli] | | |
| f664.aa | gi\|475126 | yscU [Yersinia pseudotuberculosis] | 309 | 9.80E−38 |
| | | >gi\|2996233 (AF053946) Yop | | |
| f664.aa | gi\|497216 | YscU [Yersinia enterocolitica] | 308 | 1.40E−37 |
| f664.aa | gnl\|PID\|d1007477 | flagellar protein FlhB [Salmonella | 312 | 2.10E−37 |
| | | typhimurium] | | |
| f664.aa | gnl\|PID\|e283684 | secretion system apparatus, SsaU | 312 | 8.20E−37 |
| | | [Salmonella typhimurium] | | |
| f679.aa | gi\|2688158 | (AE001136) B. burgdorferi predicted | 3714 | 0 |
| | | coding region BB0259 [Borrelia | | |
| f679.aa | gnl\|PID\|d1011473 | soluble lytic transglycosylase | 180 | 1.10E−25 |
| | | [Synechocystis sp. ] | | |
| f679.aa | gnl\|PID\|e1183177 | similar to lytic transglycosylase | 108 | 2.10E−22 |
| | | [Bacillus subtilis] | | |
| f679.aa | gi\|2984090 | (AE000756) hypothetical protein | 111 | 9.30E−17 |
| | | [Aquifex aeolicus] | | |
| f680.aa | gi\|2688153 | (AE001136) bacitracin resistance | 769 | 3.90E−109 |
| | | protein (bacA) [Borrelia | | |
| f680.aa | gnl\|PID\|e1185988 | similar to bacitracin resistance protein | 174 | 7.30E−18 |
| | | (undecaprenol | | |
| f680.aa | gi\|2622542 | (AE000905) bacitracin resistance | 116 | 3.30E−16 |
| | | protein [Methanobacterium | | |
| f680.aa | gi\|2984378 | (AE000777) undecaprenol kinase | 152 | 3.90E−15 |
| | | [Aquifex aeolicus] | | |
| f680.aa | gi\|882579 | CG Site No. 29739 [Escherichia coli] | 139 | 2.60E−12 |
| | | >gi\|1789437 (AE000387) | | |
| f688.aa | gi\|2688146 | (AE001135) conserved hypothetical | 2497 | 0 |
| | | integral membrane protein | | |
| f688.aa | gi\|2649351 | (AE001019) conserved hypothetical | 110 | 3.70E−18 |
| | | protein [Archaeoglobus fulgidus] | | |
| f688.aa | gi\|1592186 | M. jannaschii predicted coding region | 174 | 1.10E−16 |
| | | MJ1562 [Methanococcus | | |
| f7-30.aa | gi\|2690009 | (AE000786) conserved hypothetical | 682 | 1.90E−90 |
| | | protein [Borrelia burgdorferi] | | |
| f704.aa | gi\|2688137 | (AE001134) glycerol uptake facilitator | 1307 | 4.70E−181 |
| | | (glpF) [Borrelia | | |
| f704.aa | gi\|142997 | glycerol uptake facilitator [Bacillus | 191 | 1.50E−50 |
| | | subtilis] >gnl\|PID\|e1182917 | | |
| f704.aa | gi\|521003 | C01G6.1 [Caenorhabditis elegans] | 152 | 1.60E−50 |
| f704.aa | gi\|529582 | water channel protein [Rattus | 142 | 5.80E−50 |
| | | norvegicus] >pir\|I59266\|I59266 water | | |
| f704.aa | dbjl\|AB000507_1 | (AB000507) aquaporin 7 [Rattus | 155 | 1.30E−49 |
| | | norvegicus] | | |
| f704.aa | pir\|A57119\|A57119 | aquaporin 3 - human | 149 | 4.20E−44 |
| f704.aa | gi\|1109920 | coded for by C. elegans cDNA | 168 | 9.30E−44 |
| | | cm16b11; strong similarity to MIP | | |
| f704.aa | gnl\|PID\|d1019987 | (AB001325) aquaporin 3 [Homo | 148 | 5.30E−43 |
| | | sapiens] >sp\|Q92482\|AQP3_HUMAN | | |
| f704.aa | gnl\|PID\|d1025786 | (AB008775) aquaporin 9 [Homo | 144 | 1.40E−42 |
| | | sapiens] | | |
| f704.aa | gi\|146188 | glycerol diffusion facilitator | 146 | 1.30E−40 |
| | | [Escherichia coli] >gi\|305030 CG Site | | |
| f704.aa | gi\|1065485 | strong similarity to the MIP family of | 179 | 1.40E−39 |
| | | transmembrane channel | | |
| f704.aa | sp\|P31140\|GLPF_SHIFL | GLYCEROL UPTAKE | 146 | 3.30E−39 |
| | | FACILITATOR PROTEIN. | | |
| f704.aa | gi\|2587035 | (AF026270) PduF [Salmonella | 168 | 7.30E−39 |
| | | typhimurium] | | |
| | | >sp\|P37451\|PDUF_SALTY | | |
| f704.aa | gi\|1399489 | glycerol dfiffusion facilitator | 154 | 7.90E−39 |
| | | [Pseudomonas aeruginosa] | | |
| f704.aa | gi\|2649144 | (AE001005) glycerol uptake facilitator, | 150 | 1.30E−38 |
| | | MIP channel (glpF) | | |
| f707.aa | gi\|2688143 | (AE001134) B. burgdorferi predicted | 1300 | 3.90E−176 |
| | | coding region BB0238 [Borrelia | | |
| f709.aa | gi\|2688131 | (AE001133) B. burgdorferi predicted | 3437 | 0 |
| | | coding region BB0236 [Borrelia | | |
| f730.aa | gi\|2688111 | (AE001132) gufA protein [Borrelia | 1376 | 3.00E−192 |
| | | burgdorferi] >pir\|C70127\|C70127 | | |
| f730.aa | gi\|1707057 | coded for by C. elegans cDNA | 235 | 2.80E−83 |
| | | CEESS55F; coded for by C. elegans | | |
| | | cDNA | | |
| f730.aa | gi\|2621542 | (AE000831) conserved protein | 259 | 1.10E−74 |
| | | [Methanobacterium | | |
| | | thermoautotrophicum] | | |
| f730.aa | gnl\|PID\|e183440 | gufA gene product [Myxococcus | 175 | 2.30E−35 |
| | | xanthus] >gi\|49253 orfX gene | | |
| f730.aa | gi\|2984109 | (AE000757) hypothetical protein | 171 | 7.00E−28 |
| | | [Aquifex aeolicus] | | |
| f736.aa | gi\|2688115 | (AE001132) phosphate ABC | 1403 | 2.10E−186 |
| | | transporter, periplasmic phosphate- | | |
| | | binding | | |
| f736.aa | gi\|2622858 | (AE000929) phosphate-binding protein | 151 | 4.40E−30 |
| | | PstS [Methanobacterium | | |
| f736.aa | gi\|2622859 | (AE000929) phosphate-binding protein | 145 | 2.80E−24 |
| | | PstS homolog [Methanobacterium | | |
| f736.aa | gnl\|PID\|d1010224 | ORF108 [Bacillus subtilis] | 120 | 1.20E−11 |
| | | >gnl\|PID\|e1185766 alternate gene | | |
| f739.aa | gi\|2688119 | (AE001132) B. burgdorferi predicted | 1139 | 1.10E−156 |
| | | coding region BB0213 [Borrelia | | |
| f742.aa | gi\|2688100 | (AE001131) surface-located membrane | 5654 | 0 |
| | | protein 1 (lmp1) [Borrelia | | |
| f742.aa | gi\|2621120 | (AE000799) O-linked GlcNAc | 200 | 9.30E−22 |
| | | transferase [Methanobacterium | | |
| f742.aa | gi\|2621106 | (AE000798) O-linked GlcNAc | 180 | 5.80E−17 |
| | | transferase [Methanobacterium | | |
| f742.aa | pir\|E69190\|E69190 | conserved hypothetical protein MTH68 - | 154 | 1.60E−14 |
| | | Methanobacterium | | |
| f742.aa | gi\|1591608 | transformation sensitive protein | 109 | 9.90E−14 |
| | | [Methanococcus jannaschii] | | |
| f742.aa | gi\|1589778 | SPINDLY [Arabidopsis thaliana] | 101 | 1.40E−13 |
| f742.aa | gi\|2984175 | (AE000762) hypothetical protein | 132 | 7.30E−13 |
| | | [Aquifex aeolicus] | | |
| f742.aa | gi\|3037137 | (AF056198) Hsp70/Hsp90 organizing | 105 | 5.40E−11 |
| | | protein homolog [Drosophila | | |
| f743.aa | gi\|2688104 | (AE001131) B. burgdorferi predicted | 1299 | 1.70E−174 |
| | | coding region BB0209 [Borrelia | | |
| f748.aa | gi\|2688089 | (AE001130) Lambda CII stability- | 1615 | 5.10E−220 |
| | | governing protein (hflC) [Borrelia | | |
| f748.aa | gi\|436158 | putative integral membrane protease | 191 | 4.80E−35 |
| | | required for high frequency | | |
| f748.aa | gi\|1573107 | Lambda CII stability-governing protein | 193 | 4.90E−33 |
| | | (hflC) [Haemophilus | | |
| f748.aa | gi\|507735 | HflC [Vibrio parahaemolyticus] | 212 | 6.10E−26 |
| | | >sp\|P40606\|HFLC_VIBPA HFLC | | |
| | | PROTEIN | | |
| f752.aa | gi\|2688092 | (AE001130) | 2585 | 0 |
| f752.aa | gi\|2984050 | (AE000754) UDP-MurNac-tripeptide | 202 | 9.10E−74 |
| | | synthetase [Aquifex aeolicus] | | |
| f752.aa | gi\|40162 | murE gene product [Bacillus subtilis] | 157 | 6.40E−70 |
| | | >gnl\|PID\|e1185108 | | |
| f752.aa | gnl\|PID\|d1011466 | UDP-MurNac-tripeptide synthetase | 166 | 5.20E−57 |
| | | [Synechocystis sp. ] | | |
| f752.aa | gnl\|PID\|e307808 | UDP-MurNAc-tripeptide synthetase | 108 | 2.30E−51 |
| | | [Rickettsia prowazekii] | | |
| f752.aa | gi\|1574688 | UDP-MurNac-tripeptide synthetase | 166 | 3.20E−50 |
| | | (murE) [Haemophilus influenzae] | | |
| f752.aa | gnl\|PID\|e1287797 | (AL022602) udp-n- | 183 | 3.20E−50 |
| | | acetylmuramoylalanyl-d-glutamate | | |
| f752.aa | gnl\|PID\|e316022 | MurE [Mycobacterium tuberculosis] | 181 | 4.10E−46 |
| f752.aa | gi\|581032 | UDP-MurNac-tripeptide synthetase | 175 | 1.30E−41 |
| | | (MurE) [Escherichia coli] | | |
| f752.aa | gi\|2177098 | UDP-MurNAc-Dipeptide: meso- | 172 | 3.70E−41 |
| | | diaminopimelate ligase [Escherichia | | |
| f752.aa | gi\|2314673 | (AE000648) UDP-MurNac-tripeptide | 137 | 9.80E−41 |
| | | synthetase (murE) [Helicobacter | | |
| f752.aa | gi\|840843 | UDP-N-acetylmuramoylalanyl-D- | 135 | 1.70E−20 |
| | | glutamate-2,6-diaminopimelate ligase | | |
| f76-1.aa | gi\|1209837 | lipoprotein [Borrelia burgdorferi] | 395 | 2.80E−49 |
| f76-1.aa | gi\|1209873 | lipoprotein [Borrelia burgdorferi] | 250 | 7.00E−37 |
| f76-1.aa | gi\|1209843 | lipoprotein [Borrelia burgdorferi] | 267 | 7.30E−32 |
| f76-1.aa | gi\|2121280 | (AF000270) lipoprotein [Borrelia | 258 | 1.20E−30 |
| | | burgdorferi] >gi\|3095109 | | |
| f76-1.aa | gnl\|PID\|e268244 | surface-exposed lipoprotein [Borrelia | 116 | 2.40E−18 |
| | | afzelii] | | |
| f76-1.aa | gi\|1209849 | lipoprotein [Borrelia burgdorferi] | 146 | 8.30E−17 |
| f76-1.aa | gi\|3095105 | (AF046998) 2.9-8 lipoprotein [Borrelia | 148 | 5.80E−14 |
| | | burgdorferi] | | |
| f76-1.aa | gi\|3095107 | (AF046999) 2.9-9 lipoprotein [Borrelia | 127 | 7.20E−11 |
| | | burgdorferi] | | |
| f764.aa | gi\|2688084 | (AE001129) B. burgdorferi predicted | 1218 | 1.20E−164 |
| | | coding region BB0193 [Borrelia | | |
| f770.aa | gi\|2688077 | (AE001129) conserved hypothetical | 646 | 7.60E−87 |
| | | protein [Borrelia burgdorferi] | | |
| f790.aa | gi\|2688065 | (AE001128) outer membrane protein | 2013 | 2.50E−271 |
| | | (tpn50) [Borrelia burgdorferi] | | |
| f790.aa | gi\|458015 | TpN50 precursor [Treponema pallidum] | 134 | 4.30E−33 |
| f790.aa | sp\|P38369\|TP50_TREPA | OUTER MEMBRANE PROTEIN | 134 | 4.30E−33 |
| | | TPN50 PRECURSOR. | | |
| f790.aa | gi\|532658 | antigen [Treponema pallidum] | 139 | 4.30E−31 |
| | | >pir\|S61867\|S61867 antigen tpp57 - | | |
| f792.aa | gi\|2688052 | (AE001127) B. burgdorferi predicted | 3185 | 0 |
| | | coding region BB0165 [Borrelia | | |
| f797.aa | gi\|2688056 | (AE001127) B. burgdorferi predicted | 1116 | 5.30E−148 |
| | | coding region BB0159 [Borrelia | | |
| f798.aa | gi\|2688051 | (AE001127) antigen, S2, putative | 1223 | 9.70E−164 |
| | | [Borrelia burgdorferi] | | |
| f798.aa | gi\|1063419 | S2 gene product [Borrelia burgdorferi] | 116 | 4.70E−23 |
| f798.aa | gi\|2690227 | (AE000790) antigen, S2 [Borrelia | 116 | 1.50E−22 |
| | | burgdorferi] >pir\|D70207\|D70207 | | |
| f798.aa | gi\|2690128 | (AE000788) protein p23 [Borrelia | 110 | 1.40E−19 |
| | | burgdorferi] >pir\|C70257\|C70257 | | |
| f798.aa | gi\|2689956 | (AE000785) protein p23 [Borrelia | 104 | 2.70E−15 |
| | | burgdorferi] >pir\|D70225\|D70225 | | |
| f799.aa | gi\|2688043 | (AE001126) B. burgdorferi predicted | 632 | 1.40E−83 |
| | | coding region BB0156 [Borrelia | | |
| f8-10.aa | gi\|2690052 | (AE000784) antigen, P35, putative | 1241 | 1.10E−167 |
| | | [Borrelia burgdorferi] | | |
| f8-10.aa | gi\|2689955 | (AE000785) antigen, P35, putative | 298 | 1.70E−57 |
| | | [Borrelia burgdorferi] | | |
| f8-10.aa | gi\|2690120 | (AE000789) B. burgdorferi predicted | 254 | 3.80E−54 |
| | | coding region BBI34 [Borrelia | | |
| f8-10.aa | gi\|2690100 | (AE000789) B. burgdorferi predicted | 182 | 2.90E−31 |
| | | coding region BBI16 [Borrelia | | |
| f8-10.aa | gi\|2690207 | (AE000787) B. burgdorferi predicted | 196 | 1.50E−20 |
| | | coding region BBJ02 [Borrelia | | |
| f8-10.aa | gi\|2690116 | (AE000789) B. burgdorferi predicted | 192 | 5.50E−20 |
| | | coding region BBI29 [Borrelia | | |
| f8-10.aa | gi\|2690125 | (AE000788) antigen, P35, putative | 129 | 5.80E−14 |
| | | [Borrelia burgdorferi] | | |
| f8-10.aa | gi\|2690206 | (AE000787) B. burgdorferi predicted | 103 | 1.10E−13 |
| | | coding region BBJ01 [Borrelia | | |
| f8-10.aa | gi\|2690099 | (AE000789) B. burgdorferi predicted | 142 | 8.50E−13 |
| | | coding region BBI15 [Borrelia | | |
| f8-10.aa | gi\|2690115 | (AE000789) B. burgdorferi predicted | 130 | 3.30E−12 |
| | | coding region BBI28 [Borrelia | | |
| f8-14.aa | gi\|2690074 | (AE000784) B. burgdorferi predicted | 1560 | 2.60E−206 |
| | | coding region BBH37 [Borrelia | | |
| f8-14.aa | gi\|2690188 | (AE000787) B. burgdorferi predicted | 599 | 3.50E−123 |
| | | coding region BBJ08 [Borrelia | | |
| f8-14.aa | gi\|2690030 | (AE000786) B. burgdorferi predicted | 337 | 4.40E−106 |
| | | coding region BBG01 [Borrelia | | |
| f8-14.aa | gi\|2690139 | (AE000788) B. burgdorferi predicted | 173 | 8.00E−91 |
| | | coding region BBK01 [Borrelia | | |
| f8.aa | gi\|2688783 | (AE001182) B. burgdorferi predicted | 2765 | 0 |
| | | coding region BB0840 [Borrelia | | |
| f8.aa | gi\|2697112 | (AF008219) unknown [Borrelia afzelii] | 1494 | 2.80E−205 |
| f800.aa | gi\|2688044 | (AE001126) B. burgdorferi predicted | 1936 | 1.00E−262 |
| | | coding region BB0155 [Borrelia | | |
| f805.aa | gi\|2688039 | (AE001126) N-acetylglucosamine-6- | 641 | 6.30E−85 |
| | | phosphate deacetylase (nagA) | | |
| f810.aa | gi\|2688024 | (AE001125) glycine betaine, L-proline | 1527 | 4.20E−207 |
| | | ABC transporter, | | |
| f810.aa | gi\|984805 | glycine betaine-binding protein | 179 | 6.80E−21 |
| | | precursor [Bacillus subtilis] | | |
| f810.aa | gi\|1850605 | ProX [Streptococcus mutans] | 181 | 2.30E−18 |
| f814.aa | pir\|D70117\|D70117 | acriflavine resistance protein (acrB) | 5105 | 0 |
| | | homolog - Lyme disease | | |
| f814.aa | gi\|2688027 | (AE001125) acriflavine resistance | 5111 | 0 |
| | | protein (acrB) [Borrelia | | |
| f814.aa | gi\|2983346 | (AE000707) cation efflux | 325 | 4.80E−119 |
| | | (AcrB/AcrD/AcrF family) [Aquifex | | |
| | | aeolicus] | | |
| f814.aa | gi\|2313726 | (AE000574) acriflavine resistance | 327 | 4.50E−111 |
| | | protein (acrB) [Helicobacter | | |
| f814.aa | gi\|3068786 | (AF059041) RND pump protein | 297 | 1.70E−110 |
| | | [Helicobacter pylori] | | |
| f814.aa | gnl\|PID\|e1182651 | similar to acriflavin resistance protein | 257 | 8.90E−100 |
| | | [Bacillus subtilis] | | |
| f814.aa | gi\|1573914 | acriflavine resistance protein (acrB) | 294 | 2.10E−97 |
| | | [Haemophilus influenzae] | | |
| f814.aa | gnl\|PID\|e256815 | mexF [Pseudomonas aeruginosa] | 300 | 2.00E−88 |
| f814.aa | gnl\|PID\|d1019295 | cation efflux system protein CzcA | 198 | 1.30E−87 |
| | | [Synechocystis sp. ] | | |
| f814.aa | gnl\|PID\|e285274 | membrane-bound cation-proton- | 283 | 2.20E−87 |
| | | antiporter [Ralstonia eutropha] | | |
| f814.aa | gi\|438854 | envD homologue; ORFB | 290 | 6.50E−87 |
| | | [Pseudomonas aeruginosa] | | |
| | | >pir\|S39630\|S39630 | | |
| f814.aa | gnl\|PID\|d1011721 | CzcA [Alcaligenes sp. ] | 275 | 8.20E−87 |
| | | >pir\|JC4700\|JC4700 cadmium, zinc, | | |
| f814.aa | gi\|2314107 | (AE000605) cation efflux system | 266 | 2.30E−86 |
| | | protein (czcA) [Helicobacter | | |
| f814.aa | pir\|A33830\|A33830 | cation efflux system membrane protein | 275 | 3.10E−86 |
| | | czcA - Alcaligenes | | |
| f814.aa | gnl\|PID\|d1017073 | envD gene product homolog | 283 | 8.30E−86 |
| | | [Escherichia coli] >gi\|1788814 | | |
| f818.aa | gi\|2688032 | (AE001125) B. burgdorferi predicted | 664 | 3.00E−87 |
| | | coding region BB0139 [Borrelia | | |
| f82.aa | gi\|2688729 | (AE001177) B. burgdorferi predicted | 991 | 2.20E−132 |
| | | coding region BB0776 [Borrelia | | |
| f820.aa | gi\|2688029 | (AE001125) penicillin-binding protein | 3171 | 0 |
| | | (pbp-1) [Borrelia | | |
| f820.aa | gi\|580936 | SpoVD [Bacillus subtilis] | 149 | 3.00E−49 |
| | | >gnl\|PID\|e1185107 penicillin-binding | | |
| f820.aa | gi\|150283 | penicillin-binding protein 2 [Neisseria | 154 | 6.90E−43 |
| | | meningitidis] | | |
| f820.aa | gnl\|PID\|e1287798 | (AL022602) penicillin binding protein 2 | 182 | 4.20E−42 |
| | | [Mycobacterium | | |
| f820.aa | gi\|509190 | penicillin-binding protein 2 [Neisseria | 158 | 1.70E−41 |
| | | meningitidis] | | |
| f820.aa | gi\|509118 | penicillin-binding protein 2 [Neisseria | 151 | 7.10E−41 |
| | | meningitidis] | | |
| f820.aa | gi\|840842 | penicillin-binding protein 3 | 177 | 1.20E−40 |
| | | [Pseudomonas aeruginosa] | | |
| f820.aa | gi\|509065 | penicillin-binding protein 2 [Neisseria | 152 | 1.40E−40 |
| | | meningitidis] | | |
| f820.aa | gi\|509043 | penicillin-binding protein 2 [Neisseria | 150 | 2.70E−40 |
| | | meningitidis] | | |
| f820.aa | gi\|509159 | penicillin-binding protein 2 [Neisseria | 147 | 2.80E−40 |
| | | meningitidis] | | |
| f820.aa | gi\|509120 | penicillin-binding protein 2 [Neisseria | 155 | 1.60E−39 |
| | | meningitidis] | | |
| f820.aa | gi\|509157 | penicillin-binding protein 2 [Neisseria | 155 | 1.60E−39 |
| | | meningitidis] | | |
| f820.aa | gi\|509126 | penicillin-binding protein 2 [Neisseria | 158 | 1.70E−39 |
| | | meningitidis] | | |
| f820.aa | gi\|45178 | penicillin-binding protein 2 (AA 1- | 155 | 2.30E−38 |
| | | 581) [Neisseria meningitidis] | | |
| f820.aa | gi\|150279 | penicillin binding protein 2 [Neisseria | 154 | 8.70E−38 |
| | | gonorrhoeae] | | |
| f831.aa | gi\|2688018 | (AE001124) B. burgdorferi predicted | 994 | 1.20E−133 |
| | | coding region BB0126 [Borrelia | | |
| f843.aa | gi\|2688014 | (AE001124) PTS system, maltose and | 2590 | 0 |
| | | glucose-specific IIABC component | | |
| f843.aa | gi\|2688579 | (AE001166) PTS system, glucose- | 594 | 1.80E−129 |
| | | specific IIBC component (ptsG) | | |
| f843.aa | gi\|1072418 | glcA [Staphylococcus carnosus] | 283 | 1.00E−72 |
| | | >pir\|S46952\|S46952 | | |
| f843.aa | gi\|1072419 | glcB [Staphylococcus carnosus] | 248 | 1.00E−66 |
| | | >pir\|S63606\|S46953 | | |
| f843.aa | dbj∥D86417_11 | YflF [Bacillus subtilis] | 215 | 7.90E−65 |
| | | >gnl\|PID\|e1182760 similar to | | |
| f843.aa | gi\|2197104 | (AF003742) MalX homolog | 182 | 8.90E−64 |
| | | [Escherichia coli] | | |
| f843.aa | gi\|43819 | nagE gene product [Klebsiella | 264 | 8.50E−63 |
| | | pneumoniae] >pir\|S18607\|S18607 | | |
| f843.aa | gi\|146913 | N-acetylglucosamine transport protein | 256 | 1.10E−62 |
| | | [Escherichia coli] | | |
| f843.aa | gi\|39956 | IIGlc [Bacillus subtilis] | 315 | 5.20E−62 |
| | | >gnl\|PID\|e1184979 phosphotransferase | | |
| | | system | | |
| f843.aa | dbj∥D87820_1 | NagE [Vibrio cholerae non-O1] | 263 | 3.80E−61 |
| | | >pir\|JC5651\|JC5651 | | |
| f843.aa | gi\|2689888 | (AE000792) PTS system, maltose and | 198 | 1.10E−60 |
| | | glucose-specific IIABC component | | |
| f843.aa | gi\|397363 | enzyme II-glc [Salmonella | 227 | 1.20E−58 |
| | | typhimurium] >pir\|S36620\|S36620 | | |
| f843.aa | gi\|147393 | glucose-specific enzyme II of | 226 | 3.90E−57 |
| | | phosphotransferase system [Escherichia | | |
| f843.aa | gnl\|PID\|e1182187 | alternate gene name: yzfA; similar to | 180 | 9.00E−56 |
| | | phosphotransferase | | |
| f843.aa | gi\|1732194 | PTS permease for glucose [Vibrio | 349 | 4.30E−50 |
| | | furnissii] | | |
| f850.aa | gi\|2687999 | (AE001123) B. burgdorferi predicted | 2374 | 0 |
| | | coding region BB0110 [Borrelia | | |
| f853.aa | gi\|2687994 | (AE001123) basic membrane protein | 1672 | 2.20E−224 |
| | | [Borrelia burgdorferi] | | |
| f853.aa | gi\|155055 | basic membrane protein precursor | 130 | 3.60E−24 |
| | | [Treponema pallidum] | | |
| f859.aa | gi\|2688002 | (AE001123) B. burgdorferi predicted | 888 | 1.80E−115 |
| | | coding region BB0102 [Borrelia | | |
| f86.aa | gi\|2688725 | (AE001177) flagellar P-ring protein | 1647 | 1.50E−217 |
| | | (flgI) [Borrelia burgdorferi] | | |
| f86.aa | gi\|2920802 | (AF019213) FlgI [Vibrio cholerae] | 143 | 3.50E−14 |
| f86.aa | gi\|405550 | flagellar P-ring protein [Pseudomonas | 102 | 3.70E−13 |
| | | putida] >sp\|Q52082\|FLGI_PSEPU | | |
| f86.aa | gi\|144241 | flagellin [Caulobacter crescentus] | 110 | 6.70E−13 |
| | | >pir\|A41891\|A41891 basal body | | |
| f860.aa | gi\|2687998 | (AE001123) asparaginyl-tRNA | 1110 | 2.40E−149 |
| | | synthetase (asnS) [Borrelia | | |
| f860.aa | gi\|1574761 | asparaginyl-tRNA synthetase (asnS) | 634 | 1.30E−83 |
| | | [Haemophilus influenzae] | | |
| f860.aa | gi\|147935 | asparaginyl-tRNA synthetase (asnS) | 622 | 6.10E−82 |
| | | [Escherichia coli] >gi\|41000 | | |
| f860.aa | gnl\|PID\|e1202698 | (AJ222644) asparaginyl-tRNA | 404 | 2.40E−80 |
| | | synthetase [Arabidopsis thaliana] | | |
| f860.aa | gnl\|PID\|d1011495 | asparaginyl-tRNA synthetase | 618 | 4.50E−80 |
| | | [Synechocystis sp. ] | | |
| f860.aa | gi\|530408 | Asn-tRNA synthetase [Mycoplasma | 439 | 1.60E−65 |
| | | capricolum] >pir\|S77842\|S77842 | | |
| f860.aa | gi\|1045792 | asparaginyl-tRNA synthetase | 365 | 2.20E−62 |
| | | [Mycoplasma genitalium] | | |
| f860.aa | gi\|1674281 | (AE000057) Mycoplasma pneumoniae, | 338 | 3.10E−61 |
| | | asparaginyl-tRNA synthetase; | | |
| f860.aa | gnl\|PID\|e1202700 | (AJ222645) asparaginyl-tRNA | 364 | 3.90E−59 |
| | | synthetase [Arabidopsis thaliana] | | |
| f860.aa | gnl\|PID\|e264488 | YCR024c, len: 492 [Saccharomyces | 150 | 3.90E−47 |
| | | cerevisiae] >pir\|S19435\|S19435 | | |
| f860.aa | gnl\|PID\|e254305 | asparaginyl-tRNA synthetase | 370 | 1.70E−46 |
| | | [Salmonella typhi] | | |
| f860.aa | gnl\|PID\|e188505 | asparagine-tRNA ligase [Lactobacillus | 224 | 1.30E−44 |
| | | delbrueckii] | | |
| f860.aa | pir\|S71072\|S71072 | asparagine-tRNA ligase (EC 6.1.1.22) | 224 | 1.30E−44 |
| | | asnS1 - Lactobacillus | | |
| f860.aa | gnl\|PID\|e188572 | asparagine-tRNA ligase [Lactobacillus | 224 | 2.40E−44 |
| | | delbrueckii] | | |
| f860.aa | gi\|1146247 | asparaginyl-tRNA synthetase [Bacillus | 234 | 6.10E−44 |
| | | subtilis] >gnl\|PID\|e1183681 | | |
| f861.aa | gi\|2687975 | (AE001122) glutamate racemase (murI) | 1354 | 2.90E−186 |
| | | [Borrelia burgdorferi] | | |
| f861.aa | gi\|396314 | glutamate synthase [Escherichia coli] | 168 | 1.20E−16 |
| | | >gi\|290428 glutamate synthase | | |
| f861.aa | gnl\|PID\|e1165353 | glutamate racemase [Bacillus subtilis] | 120 | 1.80E−13 |
| | | >gnl\|PID\|e1184088 | | |
| f861.aa | pir\|JC5587\|JC5587 | glutamate racemase (EC 5.1.1.3) - | 122 | 1.80E−13 |
| | | Bacillus pumilus | | |
| f861.aa | sp\|P52973\|MURI_HAEIN | PROBABLE GLUTAMATE | 114 | 8.10E−13 |
| | | RACEMASE (EC 5.1.1.3). | | |
| f867.aa | gi\|2687979 | (AE001122) V-type ATPase, subunit A | 2826 | 0 |
| | | (atpA) [Borrelia burgdorferi] | | |
| f867.aa | pir\|JC5532\|JC5532 | vacuolar-type ATPase (EC 3.-.-.-) A | 594 | 2.20E−162 |
| | | chain -Desulfurococcus | | |
| f867.aa | gi\|2104726 | V-ATPase A subunit [Desulfurococcus | 594 | 3.10E−162 |
| | | sp. SY] | | |
| f867.aa | gi\|2605627 | ATPase alpha subunit [Thermococcus | 592 | 7.10E−161 |
| | | sp.] | | |
| f867.aa | gnl\|PID\|d1003475 | Na+-ATPase alpha subunit | 601 | 1.60E−153 |
| | | [Enterococcus hirae] | | |
| f867.aa | gi\|1590955 | H+-transporting ATP synthase, subunit | 585 | 6.00E−147 |
| | | A (atpA) [Methanococcus | | |
| f867.aa | gi\|496904 | membrane ATPase [Haloferax volcanii] | 728 | 6.00E−147 |
| | | >pir\|S55895\|S45144 | | |
| f867.aa | gi\|152927 | ATPase alpha subunit [Sulfolobus | 548 | 5.00E−163 |
| | | acidocaldarius] >pir\|A28652\|A28652 | | |
| f867.aa | gi\|2649416 | (AE001023) H+-transporting ATP | 748 | 2.00E−146 |
| | | synthase, subunit A (atpA) | | |
| f867.aa | gi\|2622052 | (AE000869) ATP synthase, subunit A | 607 | 9.40E−146 |
| | | [Methanobacterium | | |
| f867.aa | gi\|168926 | vacuolar ATPase vma-1 [Neurospora | 302 | 9.00E−145 |
| | | crassa] >pir\|A30799\|PXNCV7 | | |
| f867.aa | gi\|149820 | ATPase alpha subunit [Methanosarcina | 743 | 1.40E−143 |
| | | barkeri] >pir\|A34283\|A34283 | | |
| f867.aa | gi\|160736 | vacuolar ATPase [Plasmodium | 305 | 9.40E−140 |
| | | falciparum] >pir\|A48582\|A48582 | | |
| | | vacuolar | | |
| f867.aa | gnl\|PID\|d1009732 | adenosine triphosphatase A subunit | 307 | 9.00E−137 |
| | | [Acetabularia acetabulum] | | |
| f867.aa | gi\|49048 | ATPase alpha-subunit [Thermus | 684 | 4.80E−136 |
| | | aquaticus thermophilus] | | |
| f868.aa | gi\|2687980 | (AE001122) V-type ATPase, subunit B | 2205 | 1.80E−298 |
| | | (atpB) [Borrelia burgdorferi] | | |
| f868.aa | gi\|1590954 | H+-transporting ATP synthase, subunit | 156 | 2.00E−114 |
| | | B (atpB) [Methanococcus | | |
| f868.aa | gi\|2605628 | ATPase beta subunit [Thermococcus | 151 | 3.30E−108 |
| | | sp.] | | |
| f868.aa | gi\|2104727 | V-ATPase B subunit [Desulfurococcus | 151 | 1.10E−107 |
| | | sp. SY] | | |
| f868.aa | gi\|43641 | ATP synthase subunit [Halobacterium | 150 | 1.80E−107 |
| | | salinarium] >pir\|S14733\|S14733 | | |
| f868.aa | gi\|149821 | ATPase beta subunit [Methanosarcina | 172 | 1.00E−105 |
| | | barkeri] >pir\|B34283\|B34283 | | |
| f868.aa | gnl\|PID\|d1003476 | Na+-ATPase beta subunit | 151 | 1.40E−105 |
| | | [Enterococcus hirae] | | |
| f868.aa | gi\|2649415 | (AE001023) H+-transporting ATP | 151 | 1.70E−103 |
| | | synthase, subunit B (atpB) | | |
| f868.aa | gi\|496905 | membrane ATPase [Haloferax volcanii] | 153 | 5.80E−103 |
| | | >pir\|S55896\|S45145 | | |
| f868.aa | gi\|1199639 | A1AO H+ ATPase, subunit B | 173 | 2.20E−102 |
| | | [Methanosarcina mazeii] | | |
| f868.aa | gi\|2622051 | (AE000869) ATP synthase, subunit B | 155 | 1.00E−101 |
| | | [Methanobacterium | | |
| f868.aa | gnl\|PID\|d1009734 | adenosine triphosphatase B subunit | 159 | 1.30E−101 |
| | | [Acetabularia acetabulum] | | |
| f868.aa | gi\|1086645 | Similar to vacuolar ATP synthase | 163 | 1.30E−101 |
| | | (strong). [Caenorhabditis elegans] | | |
| f868.aa | gi\|459198 | vacuolar H+- ATPase subunit B | 164 | 4.60E−101 |
| | | [Gossypium hirsutum] | | |
| f868.aa | gi\|167108 | vacuolar ATPase B subunit [Hordeum | 164 | 4.60E−101 |
| | | vulgare] >sp\|Q40078\|VAT1_HORVU | | |
| f872.aa | gi\|2687986 | (AE001122) B. burgdorferi predicted | 1684 | 1.60E−230 |
| | | coding region BB0089 [Borrelia | | |
| f874.aa | gi\|2687965 | (AE001121) L-lactate dehydrogenase | 1603 | 2.80E−217 |
| | | (ldh) [Borrelia burgdorferi] | | |
| f874.aa | gi\|39758 | L-lactate dehydrogenase [Bacillus | 520 | 3.10E−109 |
| | | psychrosaccharolyticus] | | |
| f874.aa | pir\|S08183\|S08183 | L-lactate dehydrogenase (EC 1.1.1.27) | 515 | 4.30E−109 |
| | | X - Bacillus | | |
| f874.aa | pir\|A25805\|A25805 | L-lactate dehydrogenase (EC 1.1.1.27) - | 520 | 1.00E−107 |
| | | Bacillus subtilis | | |
| f874.aa | gi\|143136 | L-lactate dehydrogenase [Bacillus | 430 | 5.20E−107 |
| | | megaterium] >pir\|S00133\|DEBSLM | | |
| f874.aa | gi\|143138 | lactate dehydrogenase (EC 1.1.1.27) | 514 | 6.60E−107 |
| | | [Bacillus stearothermophilus] | | |
| f874.aa | gnl\|PID\|d1009574 | L-lactate dehydrogenase [Bacillus | 512 | 8.90E−107 |
| | | subtilis] >gnl\|PID\|e1182257 | | |
| f874.aa | gi\|143134 | lactate dehydrogenase (EC 1.1.1.27) | 516 | 1.70E−106 |
| | | [Bacillus caldotenax] | | |
| f874.aa | gi\|143132 | lactate dehydrogenase (AC 1.1.1.27) | 506 | 2.30E−106 |
| | | [Bacillus caldolyticus] | | |
| f874.aa | gi\|412392 | NAD-dependent dehydrogenase | 508 | 4.40E−106 |
| | | [unidentified] | | |
| f874.aa | gi\|143130 | L-lactate dehydrogenase [Bacillus | 510 | 1.10E−105 |
| | | caldotenax] >pir\|S00019\|S00019 | | |
| f874.aa | gi\|642256 | L-lactate dehydrogenase [Pediococcus | 560 | 1.70E−91 |
| | | acidilactici] | | |
| f874.aa | gi\|847956 | L-lactate dehydrogenase [Lactobacillus | 381 | 2.30E−91 |
| | | sake] >sp\|P50934\|LDH_LACSK | | |
| f874.aa | gi\|581305 | L-lactate dehydrogenase [Lactobacillus | 547 | 2.30E−91 |
| | | plantarum] >pir\|A36957\|A36957 | | |
| f874.aa | gi\|149575 | L(+)-lactate dehydrogenase | 386 | 3.20E−91 |
| | | [Lactobacillus casei] | | |
| f886.aa | gi\|2687958 | (AE001120) B. burgdorferi predicted | 1792 | 9.50E−237 |
| | | coding region BB0077 [Borrelia | | |
| f888.aa | gi\|2687959 | (AE001120) B. burgdorferi predicted | 2351 | 3.59999944710933e−318 |
| | | coding region BB0075 [Borrelia | | |
| f893.aa | gi\|2687962 | (AE001120) B. burgdorferi predicted | 2514 | 0 |
| | | coding region BB0071 [Borrelia | | |
| f895.aa | gi\|2687954 | (AE001120) conserved hypothetical | 747 | 3.60E−100 |
| | | protein [Borrelia burgdorferi] | | |
| f895.aa | gnl\|PID\|e1184285 | similar to hypothetical proteins | 103 | 2.50E−35 |
| | | [Bacillus subtilis] | | |
| f899.aa | gi\|2687946 | (AE001119) B. burgdorferi predicted | 1161 | 4.30E−158 |
| | | coding region BB0066 [Borrelia | | |
| f924.aa | gi\|2687934 | (AE001118) B. burgdorferi predicted | 692 | 3.90E−93 |
| | | coding region BB0044 [Borrelia | | |
| f925.aa | gi\|2687935 | (AE001118) B. burgdorferi predicted | 1771 | 7.50E−242 |
| | | coding region BB0043 [Borrelia | | |
| f929.aa | gi\|2687916 | (AE001117) B. burgdorferi predicted | 2589 | 0 |
| | | coding region BB0038 [Borrelia | | |
| f93.aa | gi\|2688703 | (AE001176) pyridoxal kinase (pdxK) | 1334 | 6.60E−181 |
| | | [Borrelia burgdorferi] | | |
| f933.aa | gi\|2687917 | (AE001117) B. burgdorferi predicted | 902 | 1.90E−122 |
| | | coding region BB0034 [Borrelia | | |
| f933.aa | gi\|2690091 | (AE000789) conserved hypothetical | 136 | 3.10E−37 |
| | | protein [Borrelia burgdorferi] | | |
| f933.aa | gi\|2690225 | (AE000790) conserved hypothetical | 149 | 4.50E−37 |
| | | protein [Borrelia burgdorferi] | | |
| f933.aa | gi\|2690045 | (AE000784) conserved hypothetical | 126 | 5.70E−28 |
| | | protein [Borrelia burgdorferi] | | |
| f933.aa | gi\|2239281 | No definition line found [Borrelia | 148 | 2.40E−14 |
| | | burgdorferi] | | |
| f939.aa | gi\|2687919 | (AE001117) B. burgdorferi predicted | 1796 | 7.50E−241 |
| | | coding region BB0028 [Borrelia | | |
| f940.aa | gi\|2687920 | (AE001117) B. burgdorferi predicted | 1109 | 1.20E−152 |
| | | coding region BB0027 [Borrelia | | |
| f943.aa | gi\|2687905 | (AE001116) B. burgdorferi predicted | 2001 | 5.00E−273 |
| | | coding region BB0024 [Borrelia | | |
| f943.aa | gi\|411592 | L-sorbosone dehydrogenase | 175 | 2.30E−15 |
| | | [unidentified] | | |
| f943.aa | gnl\|PID\|d1006418 | L-sorbosone dehydrogenase | 173 | 4.40E−15 |
| | | [Acetobacter liquefaciens] | | |
| f952.aa | gi\|2687880 | (AE001115) glpE protein (glpE) | 628 | 2.90E−84 |
| | | [Borrelia burgdorferi] | | |
| f07A.aa | R33279 | 43 kD endoflagellum sheath protein. | 120 | 6.10E−25 |
| f142.aa | R95044 | Apoptosis participating protein. | 103 | 4.70E−18 |
| f147.aa | W18209 | Staphylococcus aureus Coenzyme A | 194 | 4.80E−91 |
| | | disulphide reductase (CoADR). | | |
| f147.aa | W06425 | Water-forming NADH oxidase. | 369 | 8.00E−86 |
| f147.aa | R32089 | Benzene dioxygenase polypeptide V. | 104 | 4.70E−11 |
| f147.aa | R66733 | Aromatic dihydrodiol/catechol | 105 | 9.00E−11 |
| | | deoxygenase #5. | | |
| f152.aa | R81549 | High affinity potassium uptake | 137 | 3.70E−18 |
| | | transporter HKT1. | | |
| f157.aa | W15192 | Staphylococcus aureus cell surface | 239 | 3.40E−37 |
| | | protein. | | |
| f17-6.aa | W30763 | Mannose-1-phosphate transferase | 178 | 5.20E−16 |
| | | protein MNN4. | | |
| f17-6.aa | W03627 | Human follicle stimulating hormone | 145 | 1.30E−11 |
| | | GPR N-terminal sequence. | | |
| f17-6.aa | W03626 | Human thyrotropin GPR N-terminal | 144 | 1.90E−11 |
| | | sequence. | | |
| f17-6.aa | W21591 | Antibiotic potentiating peptide #3. | 141 | 5.10E−11 |
| f196.aa | W05196 | Helicobacter pylori 50 kDa protective | 183 | 2.70E−18 |
| | | antigen G3.8. | | |
| f196.aa | W20916 | H. pylori inner membrane protein | 180 | 3.60E−17 |
| | | 14gp12015orf12. | | |
| f196.aa | W20287 | H. pylori inner membrane protein, | 169 | 6.50E−15 |
| | | 24132293.aa. | | |
| f196.aa | W20769 | H. pylori inner membrane protein, | 169 | 1.40E−14 |
| | | 07ee20513orf28. | | |
| f196.aa | W20767 | H. pylori cytoplasmic protein, | 140 | 6.10E−14 |
| | | 07ee20513orf1. | | |
| f197.aa | W20769 | H. pylori inner membrane protein, | 190 | 2.30E−19 |
| | | 07ee20513orf28. | | |
| f197.aa | W20287 | H. pylori inner membrane protein, | 190 | 2.00E−18 |
| | | 24132293.aa. | | |
| f197.aa | W05196 | Helicobacter pylori 50 kDa protective | 179 | 4.00E−16 |
| | | antigen G3.8. | | |
| f197.aa | W20916 | H. pylori inner membrane protein | 182 | 6.30E−16 |
| | | 14gp12015orf12. | | |
| f197.aa | W20767 | H. pylori cytoplasmic protein, | 150 | 1.10E−12 |
| | | 07ee20513orf1. | | |
| f21-4.aa | R69629 | B. burgdorferi OspF operon. | 321 | 7.00E−39 |
| f21-4.aa | R89476 | B. burgdorferi OspG lipoprotein. | 107 | 6.10E−34 |
| f24-1.aa | W22676 | Borrelia variable major protein (VMP)- | 412 | 4.60E−72 |
| | | like protein VIsE. | | |
| f291.aa | W20152 | H. pylori transporter protein, | 336 | 1.70E−41 |
| | | 1464715.aa. | | |
| f291.aa | W24682 | Helicobacter pylori transporter protein | 234 | 8.20E−27 |
| | | 4882763.aa. | | |
| f291.aa | W20528 | H. pylori cell envelope transporter | 234 | 8.20E−27 |
| | | protein 4882763.aa. | | |
| f291.aa | W20592 | H. pylori transporter protein, | 168 | 7.60E−17 |
| | | 01ce11513orf21. | | |
| f301.aa | W20287 | H. pylori inner membrane protein, | 158 | 1.60E−13 |
| | | 24132293.aa. | | |
| f301.aa | W20916 | H. pylori inner membrane protein | 158 | 1.90E−13 |
| | | 14gp12015orf12. | | |
| f301.aa | W20769 | H. pylori inner membrane protein, | 158 | 2.40E−13 |
| | | 07ee20513orf28. | | |
| f301.aa | W05196 | Helicobacter pylori 50 kDa protective | 157 | 2.80E−13 |
| | | antigen G3.8. | | |
| f301.aa | W20767 | H. pylori cytoplasmic protein, | 138 | 4.30E−11 |
| | | 07ee20513orf1. | | |
| f320.aa | R24300 | Glycopeptide resistance protein VanY | 142 | 2.90E−14 |
| | | from E. faecium. | | |
| f328.aa | R15642 | CTP synthetase. | 274 | 3.00E−50 |
| f328.aa | W20778 | H. pylori cytoplasmic protein, | 122 | 1.90E−34 |
| | | 07ge20415orf6. | | |
| f352.aa | W03626 | Human thyrotropin GPR N-terminal | 153 | 4.70E−12 |
| | | sequence. | | |
| f352.aa | W21591 | Antibiotic potentiating peptide #3. | 152 | 6.60E−12 |
| f352.aa | W03627 | Human follicle stimulating hormone | 145 | 5.30E−11 |
| | | GPR N-terminal sequence. | | |
| f4-50.aa | W07187 | B. garinii IP90 decorin binding protein. | 305 | 1.30E−41 |
| f4-50.aa | W07186 | B. afzelii strain pGau decorin binding | 161 | 1.60E−34 |
| | | protein. | | |
| f4-50.aa | W07185 | B. burgdorferi HB-19 decorin binding | 173 | 2.80E−34 |
| | | protein. | | |
| f4-50.aa | W07183 | B. burgdorferi B31 decorin binding | 176 | 1.80E−33 |
| | | protein. | | |
| f4-50.aa | W07190 | B. burgdorferi JD1 decorin binding | 177 | 1.80E−33 |
| | | protein. | | |
| f4-50.aa | W07182 | B. burgdorferi 297 decorin binding | 177 | 1.10E−32 |
| | | protein. | | |
| f4-50.aa | W07189 | B. burgdorferi LP7 decorin binding | 177 | 1.10E−32 |
| | | protein. | | |
| f4-50.aa | W07188 | B. burgdorferi LP4 decorin binding | 177 | 3.90E−32 |
| | | protein. | | |
| f4-50.aa | W07184 | B. burgdorferi Sh.2.82 decorin binding | 177 | 1.30E−31 |
| | | protein. | | |
| f45-2.aa | R89476 | B. burgdorferi OspG lipoprotein. | 213 | 1.30E−35 |
| f45-2.aa | R70491 | Leucocytozoan protozoa structural | 206 | 2.10E−20 |
| | | protein epitope. | | |
| f45-2.aa | W03626 | Human thyrotropin GPR N-terminal | 211 | 6.10E−20 |
| | | sequence. | | |
| f45-2.aa | W03627 | Human follicle stimulating hormone | 202 | 8.90E−19 |
| | | GPR N-terminal sequence. | | |
| f45-2.aa | R69629 | B. burgdorferi OspF operon. | 111 | 1.10E−14 |
| f45-2.aa | W30763 | Mannose-1-phosphate transferase | 166 | 1.00E−13 |
| | | protein MNN4. | | |
| f45-2.aa | R97866 | Chicken leucocytozoan immunogenic | 154 | 7.10E−12 |
| | | protein for use in vaccines. | | |
| f488.aa | W15078 | M. leprae gyrA precursor. | 390 | 2.70E−143 |
| f488.aa | R88733 | S. aureus mutant grlA protein. | 698 | 6.70E−122 |
| f488.aa | R88731 | S. aureus topoisomerase IV grlA | 698 | 6.70E−122 |
| | | subunit. | | |
| f49-2.aa | W22676 | Borrelia variable major protein (VMP)- | 497 | 2.70E−75 |
| | | like protein VlsE. | | |
| f5-14.aa | W03626 | Human thyrotropin GPR N-terminal | 234 | 6.60E−23 |
| | | sequence. | | |
| f5-14.aa | W03627 | Human follicle stimulating hormone | 231 | 1.40E−22 |
| | | GPR N-terminal sequence. | | |
| f5-14.aa | R70491 | Leucocytozoan protozoa structural | 221 | 1.00E−20 |
| | | protein epitope. | | |
| f5-14.aa | W30763 | Mannose-1-phosphate transferase | 203 | 1.60E−18 |
| | | protein MNN4. | | |
| f5-14.aa | R97866 | Chicken leucocytozoan immunogenic | 187 | 2.10E−15 |
| | | protein for use in vaccines. | | |
| f5-14.aa | W21591 | Antibiotic potentiating peptide #3. | 176 | 4.60E−15 |
| f5-14.aa | R69629 | B. burgdorferi OspF operon. | 106 | 3.50E−13 |
| f5-14.aa | R89476 | B. burgdorferi OspG lipoprotein. | 157 | 6.20E−13 |
| f5-14.aa | W26536 | Trypanosoma cruzi antigen. | 143 | 5.00E−11 |
| f5-15.aa | R69629 | B. burgdorferi OspF operon. | 448 | 1.30E−68 |
| f5-15.aa | R89476 | B. burgdorferi OspG lipoprotein. | 105 | 5.80E−24 |
| f502.aa | R69852 | Ethylene response (ETR) mutant | 191 | 1.90E−35 |
| | | protein etr1-3. | | |
| f502.aa | R69849 | Ethylene response (ETR) gene product. | 191 | 2.70E−35 |
| f502.aa | R69853 | Ethylene response (ETR) mutant | 191 | 2.70E−35 |
| | | protein etr1-4. | | |
| f502.aa | R69850 | Ethylene response (ETR) mutant | 191 | 3.60E−35 |
| | | protein etr1-1. | | |
| f502.aa | R69851 | Ethylene response (ETR) mutant | 191 | 3.60E−35 |
| | | protein etr1-2. | | |
| f502.aa | R74632 | QETR ethylene response (ETR) protein | 190 | 5.20E−26 |
| | | from Arabidopsis thaliana. | | |
| f502.aa | R74629 | Tomato ethylene response (TETR) | 171 | 6.50E−23 |
| | | protein. | | |
| f502.aa | R74633 | Nr (never ripe) tomato ethylene | 171 | 6.50E−23 |
| | | response (ETR) protein. | | |
| f502.aa | R74630 | Tomato TGETR1 ethylene response | 123 | 1.20E−19 |
| | | protein. | | |
| f51-2.aa | W03626 | Human thyrotropin GPR N-terminal | 235 | 2.90E−23 |
| | | sequence. | | |
| f51-2.aa | R89476 | B. burgdorferi OspG lipoprotein. | 109 | 6.90E−23 |
| f51-2.aa | W03627 | Human follicle stimulating hormone | 228 | 2.20E−22 |
| | | GPR N-terminal sequence. | | |
| f51-2.aa | W30763 | Mannose-1-phosphate transferase | 203 | 1.00E−18 |
| | | protein MNN4. | | |
| f51-2.aa | R70491 | Leucocytozoan protozoa structural | 191 | 7.50E−18 |
| | | protein epitope. | | |
| f51-2.aa | R97866 | Chicken leucocytozoan immunogenic | 183 | 4.80E−16 |
| | | protein for use in vaccines. | | |
| f51-2.aa | W21591 | Antibiotic potentiating peptide #3. | 159 | 6.20E−13 |
| f51-2.aa | R68838 | Plasmodium falciparum ABRA gene | 142 | 1.10E−12 |
| | | protein. | | |
| f51-2.aa | R27530 | Plasmodium falciparum blood and liver | 142 | 2.80E−12 |
| | | stage ABRA antigen. | | |
| f51-2.aa | W31186 | Human p160 polypeptide 160.2. | 148 | 2.30E−11 |
| f51-2.aa | W31185 | Human p160 polypeptide 160.1. | 148 | 2.40E−11 |
| f517.aa | W24296 | Staphylococcus aureus Gene #1 | 237 | 6.80E−30 |
| | | polypeptide sequence 2. | | |
| f541.aa | R31013 | P39-alpha. | 1253 | 3.80E−229 |
| f541.aa | R33280 | P39-beta. | 504 | 1.90E−117 |
| f542.aa | R33280 | P39-beta. | 711 | 3.20E−96 |
| f542.aa | R31013 | P39-alpha. | 101 | 7.90E−16 |
| f561.aa | R69631 | B. burgdorferi T5 protein. | 982 | 6.90E−131 |
| f598.aa | W20289 | H. pylori transporter protein, | 264 | 9.90E−33 |
| | | 24218968.aa. | | |
| f598.aa | W20640 | H. pylori transporter protein, | 264 | 1.00E−30 |
| | | 02ce11022orf8. | | |
| f598.aa | W20101 | H. pylori transporter protein | 233 | 8.50E−27 |
| | | 11132778.aa. | | |
| f598.aa | W20861 | H. pylori cell envelope transporter | 233 | 9.60E−27 |
| | | protein, 12ge10305orf16. | | |
| f598.aa | W34202 | Streptomyces efflux pump protein | 196 | 2.80E−21 |
| | | (frenolicin gene D product). | | |
| f598.aa | R71091 | C. jejuni PEB1A antigen from ORF3. | 168 | 1.20E−17 |
| f600.aa | W25527 | Staphylococcus aureus Gene #20 | 209 | 3.40E−26 |
| | | polypeptide sequence 2. | | |
| f600.aa | W34201 | Streptomyces efflux pump protein | 169 | 6.50E−19 |
| | | (frenolicin gene C product). | | |
| f600.aa | W20639 | H. pylori transporter protein, | 127 | 1.10E−14 |
| | | 02ce11022orf7. | | |
| f603.aa | W34200 | Streptomyces efflux pump protein | 155 | 7.40E−32 |
| | | (frenolicin gene B product). | | |
| f604.aa | R48035 | Hyaluronic acid synthase of | 110 | 2.30E−20 |
| | | Streptococcus equisimilis. | | |
| f606.aa | R48035 | Hyaluronic acid synthase of | 116 | 1.20E−25 |
| | | Streptococcus equisimilis. | | |
| f607.aa | R48035 | Hyaluronic acid synthase of | 141 | 1.50E−26 |
| | | Streptococcus equisimilis. | | |
| f631.aa | W15192 | Staphylococcus aureus cell surface | 160 | 7.30E−29 |
| | | protein. | | |
| f664.aa | W20105 | H. pylori flagella-associated protein, | 202 | 3.20E−46 |
| | | 1171928.aa. | | |
| f664.aa | W20688 | H. pylori flagella-associated protein | 202 | 2.60E−45 |
| | | 04ge11713orf5. | | |
| f664.aa | R97245 | Virulence gene cluster polypeptide | 158 | 3.90E−13 |
| | | product. | | |
| f704.aa | R60153 | Nematode-inducible transmembrane | 104 | 2.50E−18 |
| | | pore protein. | | |
| f704.aa | R33913 | Sequence encoded by TobRB7-5A | 104 | 2.50E−18 |
| | | which encodes a membrane channel | | |
| f704.aa | R77082 | Tobacco root specific promoter RB7 | 104 | 2.50E−18 |
| | | from clone lambda5A (TobRB7-5A). | | |
| f742.aa | W46499 | Amino acid sequence of the spindly | 101 | 2.50E−14 |
| | | (SPY) protein of Arabidopsis. | | |
| f752.aa | W20733 | H. pylori cell envelope protein, | 141 | 3.00E−37 |
| | | 06cp11722orf15. | | |
| f752.aa | W20358 | H. pylori cell envelope protein | 110 | 4.20E−18 |
| | | 26366312.aa. | | |
| f814.aa | W20753 | H. pylori transporter protein, | 178 | 7.90E−35 |
| | | 06gp11202orf7. | | |
| f814.aa | W20420 | H. pylori cell envelope transporter | 160 | 2.30E−21 |
| | | protein 33399142.aa. | | |
| f843.aa | R14319 | Human T-cell immunosuppressive | 167 | 1.20E−19 |
| | | factor. | | |
| f860.aa | W21894 | Asparaginyl-tRNA synthetase from | 245 | 2.30E−38 |
| | | Staphylococcus aureus. | | |
| f860.aa | W33903 | Streptococcus pneumoniae asparaginyl | 177 | 1.10E−22 |
| | | tRNA synthetase. | | |
| f867.aa | W34261 | An alpha subunit of a thermostable | 592 | 1.30E−161 |
| | | ATPase. | | |
| f867.aa | R10098 | Alpha subunit of ATP-synthase. | 741 | 4.90E−144 |
| f867.aa | R31522 | Carrot reverse transcriptase. | 311 | 4.60E−130 |
| f867.aa | R10099 | Beta subunit of ATP-synthase. | 121 | 7.90E−14 |
| f867.aa | W34262 | A beta subunit of a thermostable | 116 | 1.00E−12 |
| | | ATPase. | | |
| f868.aa | W34262 | A beta subunit of a thermostable | 151 | 6.10E−109 |
| | | ATPase. | | |
| f868.aa | R10099 | Beta subunit of ATP-synthase. | 172 | 1.90E−106 |
| f868.aa | W34261 | An alpha subunit of a thermostable | 117 | 3.10E−19 |
| | | ATPase. | | |
| f868.aa | R10098 | Alpha subunit of ATP-synthase. | 113 | 2.00E−18 |
| f868.aa | R31522 | Carrot reverse transcriptase. | 101 | 7.10E−15 |
| f874.aa | R10591 | L-lactic acid dehyrogenase. | 538 | 7.20E−109 |
| f874.aa | R08355 | Recombinant thermophilic NAD- | 455 | 9.80E−99 |
| | | dependant dehydrogenase. | | |
| f874.aa | R09295 | Recombinant thermophilic NAD- | 455 | 9.80E−99 |
| | | dependant dehydrogenase. | | |
| f874.aa | R15736 | L-lactic acid dehydrogenase. | 426 | 1.60E−85 |
| f874.aa | P91948 | Pig H4 isoenzyme. | 393 | 2.00E−82 |
| f874.aa | W33108 | Chicken lactic acid dehydrogenase type | 390 | 2.20E−80 |
| | | B subunit. | | |
| f874.aa | W33107 | Chicken lactic acid dehydrogenase type | 385 | 1.10E−79 |
| | | B subunit. | | |
| f874.aa | P80891 | Testis-specific lactate dehydrogenase | 339 | 5.50E−74 |
| | | subunit LDH-C4. | | |
| f874.aa | R94013 | Heat resistant maleate dehydrogenase. | 255 | 1.30E−55 |
| f874.aa | R11119 | Recombinant L-2-hydroxyisocaproic | 224 | 7.90E−49 |
| | | acid dehydrogenase. | | |
| f874.aa | R62605 | P. falciparum lactate dehydrogenase. | 255 | 2.00E−44 |
| f874.aa | W11476 | Eimeria lactate dehydrogenase. | 203 | 1.10E−25 |
| f943.aa | P91223 | Coenzyme-independent L-sorbosone | 175 | 4.30E−16 |
| | | dehydrogenase from Gluconobacter | | |

[0277] TABLE 3
Conservative Amino Acid Substitutions.

| | |
|---|---|
| Aromatic | Phenylalanine |
| | Tryptophan |
| | Tyrosine |
| Hydrophobic | Leucine |
| | Isoleucine |
| | Valine |
| Polar | Glutamine |
| | Asparagine |
| Basic | Arginine |
| | Lysine |
| | Histidine |
| Acidic | Aspartic Acid |
| | Glutamic Acid |
| Small | Alanine |
| | Serine |
| | Threonine |
| | Methionine |
| | Glycine |

[0278] TABLE 4
Residues Comprising Epito-Bearing Fragments

| Query | Residues Comprising Epito-Bearing Fragments |
|---|---|
| f101.aa | from about Lys-62 to about Gly-64, from about Ser-111 to about Asp-113, |
| | from about Arg-136 to about Arg-139, from about Pro-189 to about Asn-193. |
| f11.aa | from about Pro-38 to about Lys-40, from about Glu-92 to about Lys-96. |
| f12.aa | from about Pro-288 to about Asp-290, from about Asn-336 to about Gly-338, |
| | from about Tyr-410 to about Gly-413, from about Asp-418 to about Arg-420, |
| | from about Pro-552 to about Val-555, from |
| | about Gln-643 to about Asp-645, from about Gln-1061 to about Arg-1063, |
| | from about Asn-1130 to about Lys-1132. |
| f129.aa | from about Glu-76 to about Arg-81, from about Lys-144 to about Asn-146. |
| f147.aa | from about Gln-94 to about Thr-96. |
| f152.aa | from about Gly-35 to about Gly-37, from about Gln-321 to about Gly-323. |
| f154.aa | from about Asn-39 to about Lys-41, from about Ser-74 to about Lys-77, from |
| | about Ser-213 to about Gly-215, from about Ser-303 to about Asp-306, from |
| | about Asp-422 to about Asn-424. |
| f157.aa | from about Lys-21 to about Asp-24, from about Ser-45 to about Tyr-47. |
| f17.aa | from about Arg-17 to about Asn-20, from about Thr-94 to about Gly-96. |
| f186.aa | from about Lys-305 to about Tyr-308. |
| f196.aa | from about Lys-121 to about Asn-123, from about Pro-278 to about Lys-282, |
| | from about Glu-576 to about Tyr-578. |
| f899.aa | from about Asn-174 to about Asp-177. |
| f925.aa | from about Lys-201 to about Asp-204, from about Phe-291 to about Lys-294. |
| f929.aa | from about Pro-139 to about Asn-141, from about Arg-211 to about Glu-214, |
| | from about Thr-370 to about Asn-375. |
| f933.aa | from about Ser-139 to about Lys-143. |
| f940.aa | from about Gly-143 to about Asn-148. |
| f943.aa | from about Asp-58 to about Asp-60, from about Lys-157 to about Asn-159, |
| | from about Asp-217 to about Asp-221, from about Lys-250 to about Asn-254, |
| | from about Pro-262 to about Asn-264, from about Gly-305 to about Trp-307. |
| f952.aa | from about Ser-52 to about Ser-54. |
| f4.aa | from about Arg-64 to about Arg-67. |
| f43.aa | from about Ser-84 to about Gln-87, from about Asp-231 to about Tyr-233, |
| | from about Arg-296 to about Asp-300. |
| f50.aa | from about Glu-136 to about Gly-138, from about Asp-153 to about Lys-155, |
| | from about Asp-289 to about Asp-291, from about Glu-458 to about Asn-461. |
| f65.aa | from about Glu-120 to about Asp-122, from about Pro-204 to about Tyr-206. |
| f8.aa | from about Pro-263 to about Arg-265, from about Asp-274 to about Lys-278. |
| f82.aa | from about Tyr-66 to about Gly-68, from about Ser-116 to about Lys-119, |
| | from about Asp-121 to about Gly-123, from about Pro-128 to about Gly-131. |
| f86.aa | from about Asn-179 to about Asn-181, from about Lys-192 to about Asn-194, |
| | from about Lys-270 to about Asn-272, from about Lys-279 to about Lys-282, |
| | from about Asp-331 to about Asn-333. |
| f477.aa | from about Pro-250 to about Lys-253. |
| f488.aa | from about Lys-76 to about Lys-79, from about Asn-486 to about Asp-489, |
| | from about Lys-508 to about Gly-510, from about Asn-559 to about Gly-562. |
| f494.aa | from about Lys-76 to about Asn-78. |
| f516.aa | from about Lys-32 to about Asp-34. |
| f523.aa | from about Pro-202 to about Asn-206, from about Lys-255 to about Tyr-258. |
| f526.aa | from about Asn-85 to about Lys-88, from about Asp-136 to about Gly-138. |
| f577.aa | from about Cys-18 to about Lys-22, from about Asn-297 to about Gln-300. |
| f584.aa | from about Pro-131 to about Lys-133, from about Pro-200 to about Ser-202. |
| f596.aa | from about Arg-42 to about Asp-44, from about Asp-117 to about Tyr-119, |
| | from about Pro-205 to about Asp-207. |
| f600.aa | from about Pro-143 to about Asp-145. |
| f603.aa | from about Phe-35 to about Ser-37. |
| f607.aa | from about Gln-67 to about Lys-70, from about Asp-273 to about Tyr-275, |
| | from about Asp-333 to about Gly-338, from about Pro-359 to about Lys-362, |
| | from about Arg-409 to about Gly-411. |
| f611.aa | from about Arg-133 to about Gly-135. |
| f631.aa | from about Pro-132 to about Asn-136, from about Asn-159 to about Tyr-161, |
| | from about Pro-216 to about Asp-218, from about Pro-220 to about Lys-223. |
| f688.aa | from about Lys-266 to about Asp-268, from about Lys-271 to about Asn-273, |
| | from about Lys-315 to about Lys-318. |
| f704.aa | from about Lys-250 to about Lys-253. |
| f707.aa | from about Lys-131 to about Asp-134, from about Asp-246 to about Asn-249. |
| f709.aa | from about Tyr-39 to about Gly-42, from about Lys-148 to about Gly-150, |
| | from about Arg-269 to about Gly-272, from about Ser-466 to about Tyr-468, |
| | from about Asn-489 to about Asn-491, from |
| | about Lys-575 to about Asp-578, from about Pro-642 to about Lys-644. |
| f197.aa | from about Pro-217 to about Asp-219, from about Glu-675 to about Asp-678, |
| | from about Pro-687 to about Asn-689, from about Glu-694 to about Gln-696. |
| f200.aa | from about Arg-174 to about Phe-179. |
| f208.aa | from about Arg-326 to about Ser-328. |
| f210.aa | from about Pro-191 to about Ile-194. |
| f221.aa | from about Asn-133 to about Asn-135. |
| f253.aa | from about Arg-191 to about Gly-194. |
| f269.aa | from about Ser-271 to about Thr-273, from about Asp-284 to about Gly-286. |
| f29.aa | from about Pro-159 to about Ser-161. |
| f290.aa | from about Pro-240 to about Gly-244. |
| f291.aa | from about Gln-267 to about Lys-269. |
| f296.aa | from about Glu-98 to about Lys-101. |
| f3.aa | from about Asn-241 to about Lys-245. |
| f30.aa | from about Asn-156 to about Tyr-159, from about Asn-178 to about Lys-180. |
| f939.aa | from about Ser-245 to about Asn-249. |
| f739.aa | from about Asn-80 to about Tyr-82, from about Lys-208 to about Ser-210. |
| f742.aa | from about Ser-141 to about Asp-145, from about Asn-222 to about Gln-225, |
| | from about Asp-243 to about Tyr-247, from about Asn-249 to about Asn-251. |
| f743.aa | from about Arg-111 to about Gly-114, from about Pro-131 to about Asp-134. |
| f790.aa | from about Thr-40 to about Asn-42, from about Ser-53 to about Ser-55, from |
| | about Lys-215 to about Asp-218, from about Asn-274 to about Gly-277. |
| f792.aa | from about Val-82 to about Ser-84, from about Ser-102 to about Asn-104, |
| | from about Gln-127 to about Tyr-130, from about Lys-309 to about Asn-314, |
| | from about Lys-375 to about Thr-377, from |
| | about Pro-511 to about His-513, from about Thr-515 to about Asp-517. |
| f797.aa | from about Pro-119 to about Gly-122, from about Lys-166 to about Asn-169. |
| f799.aa | from about Asn-31 to about Asn-34, from about Gln-44 to about Asn-47, from |
| | about Pro-123 to about Gly-125. |
| f814.aa | from about Ser-120 to about Ser-122, from about Arg-636 to about Asn-638, |
| | from about Cys-967 to about Ser-969. |
| f820.aa | from about Thr-563 to about Tyr-565. |
| f850.aa | from about Tyr-159 to about Tyr-164, from about Gln-375 to about Asp-379. |
| f853.aa | from about Thr-180 to about Lys-184, from about Arg-231 to about Asp-233, |
| | from about Asn-252 to about Gly-254. |
| f859.aa | from about Lys-46 to about Ser-52, from about Pro-88 to about Asn-91, from |
| | about Asn-117 to about Asp-120. |
| f861.aa | from about Asp-38 to about Lys-40, from about Lys-219 to about Asn-225. |
| f368.aa | from about Gln-228 to about Asn-231. |
| f371.aa | from about Tyr-109 to about Asn-111, from about Asn-162 to about Gln-164. |
| f502.aa | from about Asn-118 to about Lys-122, from about Ser-269 to about Gly-271, |
| | from about Lys-370 to about Asp-373, from about Asn-509 to about Lys-511, |
| | from about Lys-705 to about Arg-707, from |
| | about Thr-912 to about Gly-914, from about Pro-1213 to about Asp-1216, from |
| | about Asn-1491 to about Arg-1493. |
| f527.aa | from about Cys-20 to about Gln-22, from about Asn-38 to about Asn-40, from |
| | about Phe-112 to about Asp-114, from about Lys-160 to about Asn-162, from |
| | about Ser-199 to about Asp-201, from about |
| | Gln-258 to about Gly-261, from about Arg-282 to about Asn-284, from about |
| | Ser-297 to about Asp-299. |
| f541.aa | from about Ser-68 to about Asn-71. |
| f604.aa | from about Lys-77 to about Gly-79, from about Lys-201 to about Asn-203, |
| | from about Asp-252 to about Asp-254, from about Tyr-347 to about Gly-350, |
| | from about Asp-514 to about Trp-516. |
| f736.aa | from about Lys-20 to about Asn-24, from about Arg-147 to about Ser-153, |
| | from about Ser-231 to about Lys-233. |
| f752.aa | from about Thr-119 to about Lys-122, from about Pro-420 to about Gly-422. |
| f798.aa | from about Asp-33 to about Thr-36, from about Lys-180 to about His-183. |
| f635.aa | from about Pro-100 to about Asn-102, from about Asp-145 to about Phe-147. |
| f32.aa | from about Lys-18 to about Asn-20. |
| f320.aa | from about Asn-193 to about Leu-195, from about Gln-248 to about Lys-250. |
| f352.aa | from about Ser-46 to about Asn-49. |
| f301.aa | from about Lys-178 to about Lys-180, from about Ser-401 to about Tyr-404. |
| f373.aa | from about Gly-88 to about Lys-90, from about Asn-539 to about Lys-542, |
| | from about Glu-654 to about Ser-657. |
| f384.aa | from about Pro-250 to about Asn-252, from about Asp-266 to about Lys-268. |
| f446.aa | from about Asp-20 to about Ser-26, from about Asn-146 to about Lys-149. |
| f542.aa | from about Arg-86 to about Gly-88, from about Arg-163 to about Asn-165. |
| f93.aa | from about Asn-152 to about Asp-155. |
| f105.aa | from about Asp-48 to about Phe-50. |
| f150.aa | from about Thr-214 to about Asp-218, from about Asp-256 to about Asp-259. |
| f219.aa | from about Asn-77 to about Asn-81, from about Asp-111 to about Asn-115. |
| f229.aa | from about Gln-61 to about Asn-63. |
| f32.aa | from about Lys-18 to about Asn-20. |
| f186.aa | from about Lys-305 to about Tyr-308. |
| f216.aa | from about Ser-105 to about Asn-107. |
| f328.aa | from about Asn-105 to about Asp-107. |
| f352.aa | from about Ser-46 to about Asn-49. |
| f867.aa | from about Thr-3 to about Gly-5, from about Lys-156 to about Ser-159. |
| f868.aa | from about Arg-94 to about Gly-96, from about Pro-257 to about Gly-261, |
| | from about Pro-295 to about Asp-297, from about Arg-340 to about Asp-342. |
| f872.aa | from about Ser-19 to about Lys-23, from about Thr-139 to about Asp-142, |
| | from about Ser-282 to about Tyr-286, from about Ser-311 to about Ser-313. |
| f886.aa | from about Thr-83 to about Asp-85, from about Asp-106 to about Lys-108, |
| | from about Lys-143 to about Gly-147, from about Asp-186 to about Asn-191. |
| f888.aa | from about Asn-65 to about Asp-67. |
| f893.aa | from about Asn-203 to about Asn-207, from about Thr-446 to about Asn-450. |
| f605.aa | from about Arg-31 to about Asp-33. |
| f606.aa | from about Asn-68 to about Gly-71, from about Asn-136 to about Lys-139, |
| | from about Asn-223 to about Tyr-226, from about Ser-276 to about Tyr-279, |
| | from about Pro-362 to about Asn-365, from |
| | about Arg-503 to about Trp-507. |
| f679.aa | from about Lys-154 to about Asp-156, from about Lys-224 to about Arg-226, |
| | from about Asn-260 to about Asp-264, from about Glu-363 to about Lys-366, |
| | from about Asp-387 to about Gly-389, from |
| | about Tyr-441 to about Lys-443, from about Arg-501 to about Tyr-504. |
| f11-12.aa | from about Pro-91 to about Asn-93, from about Pro-181 to about Asp-186, |
| | from about Lys-244 to about Ser-248. |
| f11-4.aa | from about Asn-160 to about Lys-163. |
| f14-8.aa | from about Pro-92 to about Gln-95, from about Lys-123 to about Thr-125, |
| | from about Lys-215 to about Asp-219. |
| f17-6.aa | from about Pro-36 to about Glu-38. |
| f19-2.aa | from about Ser-104 to about Ser-106, from about Gln-230 to about Asn-232. |
| f19-4.aa | from about Val-79 to about Thr-82, from about Pro-195 to about Gly-201. |
| f19-6.aa | from about Asp-24 to about Lys-30, from about Pro-36 to about Glu-38. |
| f21-4.aa | from about Cys-24 to about Asn-26. |
| f28-2.aa | from about Ser-77 to about Lys-80, from about Tyr-274 to about Asn-277. |
| f28-3.aa | from about Glu-53 to about Arg-57, from about Gln-82 to about Asn-85, from |
| | about Gln-157 to about Asn-159. |
| f31-2.aa | from about Arg-95 to about Arg-97, from about Asn-297 to about Asn-299. |
| f4-15.aa | from about Pro-182 to about Asp-184, from about Lys-220 to about Asp-222. |
| f4-50.aa | from about Thr-109 to about Asn-111. |
| f42-1.aa | from about Asn-55 to about Asn-57, from about Arg-81 to about Ser-84, from |
| | about Asp-94 to about Asn-97. |
| f45-2.aa | from about Asn-83 to about Gly-86. |
| f47-2.aa | from about Ser-29 to about Asp-33, from about Asn-94 to about Lys-99, from |
| | about Pro-152 to about Lys-157. |
| f49-2.aa | from about Asn-452 to about Gly-454. |
| f5-14.aa | from about Glu-102 to about Asp-106, from about Thr-272 to about Asn-275, |
| | from about Glu-313 to about Asn-315, from about Ser-370 to about Ser-372. |
| f5-15.aa | from about Lys-170 to about Gly-173, from about Asn-194 to about Gly-196. |
| f51-2.aa | from about Asp-302 to about Lys-304. |
| f6-21.aa | from about Glu-38 to about Asn-42, from about Arg-84 to about Gly-87. |
| f6-27.aa | from about Asp-67 to about Asn-69, from about Arg-85 to about Asn-89, from |
| | about Lys-168 to about Gly-171, from about Lys-179 to about Asn-181, from |
| | about Ser-380 to about His-382. |
| f6-5.aa | from about Ser-67 to about Asn-71. |
| f7-30.aa | from about Pro-94 to about Asp-96, from about Lys-144 to about Arg-147. |
| f76-1.aa | from about Asn-30 to about Lys-35, from about Lys-113 to about Gly-116, |
| | from about Glu-119 to about Lys-121. |
| f8-10.aa | from about Pro-25 to about Lys-32, from about Ser-168 to about Thr-172. |
| f01a.aa_bb001 | from about Pro-123 to about Asp-125, from about Ser-179 to about Asp-181, |
| | from about Lys-255 to about Gly-259. |
| _bb0011 | from about Ala8 about Arg 17, from about Tyr31 to about Gly40, from about |
| | Ser65 to about Lys78, from about Val93 to about Asp102, from about Ser120 |
| | to about Ile129, from about Pro156 to about Glu170, from about Lys187 to |
| | about Asn 196, from about His205 to about Lys214, from about Gly226 to |
| | about Glu235, fro about Gln253 to about Asn266, from about Glu283 to about |
| | Glu293, from about Leu311 to about Ile320, from about Arg326 to about |
| | Gly335, from about Pro340 to about Ala349 |
| f02a.aa_bb002 | from about Tyr-169 to about Asn-171, from about Tyr-242 to about Asn-245, |
| | from about Lys-264 to about Asp-267. |
| _bb9 | from about Met7 to about Lys16, from about Lys47 to about Ser57, from about |
| | Asn80 to about Ser89, from about Gly103 to about Glu113, from about Lys125 |
| | to about Pro133, from about Lys138 to about Ala147 |
| f03a.aa_bb006 | from about Asp-54 to about Thr-57, from about Lys-201 to about His-204. |
| _bb014 | from about Pro23 to about Gln31, from about Ser37 to about Asp45, from |
| | about Leu76 to about Asn84, from about Leu76 to about Val84, from about |
| | Ser89 to about Asn97, from about Ser105 to about Lys113, from about Asn120 |
| | to about Met128, from about Asn159 to about Gly 167, from about Lys173 to |
| | about Bal181 |
| _bb023 | from about Asp17 to about Gly27, from about Arg40 to about Asp48, from |
| | about Val64 to about Asp72, from about Glu105 to about Thr113, from about |
| | Ser141 to about Gly150, from about Asp155 to about Ile163, from about |
| | Asn184 to about Lys198, from about Ile219 to about Pro227, from about |
| | Ser230 to about Phe238, from about Ser241 to about Asn250, from about |
| | Asp270 to about Val278, from about Ser285 to about Leu293, from about |
| | Glyu307 to about Ser315, from about Lys327 to about Asn335 |
| f08a.aa_bb024 | from about Asn-30 to about Asp-33, from about Ser-116 to about Asn-118, |
| | from about Asn-154 to about Gly-156. |
| f09a.aa_bb025 | from about Asn-30 to about Ser-35, from about Thr-145 to about Asn-148. |

1. An isolated nucleic acid molecule comprising a polynucleotide having a nucleotide sequence selected from the group consisting of:
(a) a nucleotide sequence encoding any one of the amino acid sequences of the polypeptides shown in Table 1;
(b) a nucleotide sequence complementary to any one of the nucleotide sequences in (a);
(c) a nucleotide sequence at least 95% identical to any one of the nucleotide sequences shown in Table 1; and
(d) a nucleotide sequence at least 95% identical to a nucleotide sequence complementary to any one of the nucleotide sequences shown in Table 1.

2. An isolated nucleic acid molecule of claim 1 comprising a polynucleotide which hybridizes under stringent hybridization conditions to a polynucleotide having a nucleotide sequence identical to a nucleotide sequence in (a) or (b) of claim 1.

3. An isolated nucleic acid molecule of claim 1 comprising a polynucleotide which encodes an epitope-bearing portion of a polypeptide in (a) of claim 1.

4. The isolated nucleic acid molecule of claim 3, wherein said epitope-bearing portion of a polypeptide comprises an amino acid sequence listed in Table 4.

5. A method for making a recombinant vector comprising inserting an isolated nucleic acid molecule of claim 1 into a vector.

6. A recombinant vector produced by the method of claim 5.

7. A host cell comprising the vector of claim 6.

8. A method of producing a polypeptide comprising:
(a) growing the host cell of claim 7 such that the protein is expressed by the cell; and
(b) recovering the expressed polypeptide.

9. An isolated polypeptide comprising a polypeptide selected from the group consisting of:
(a) a polypeptide consisting of one of the complete amino acid sequences of Table 1;
(b) a polypeptide consisting of one the complete amino acid sequences of Table 1 except the N-terminal residue;
(c) a fragment of the polypeptide of (a) having biological activity; and
(d) a fragment of the polypeptide of (a) which binds to an antibody specific for the polypeptide of (a).

10. An isolated antibody specific for the polypeptide of claim 9.

11. A polypeptide produced according to the method of claim 8.

12. An isolated polypeptide comprising an amino acid sequence at least 95% identical to the polypeptide of claim 9.

13. An isolated polypeptide antigen comprising an amino acid sequence of an B. burgdorferi epitope shown in Table 4.

14. An isolated nucleic acid molecule comprising a polynucleotide with a nucleotide sequence encoding a polypeptide of claim 9.

15. A hybridoma which produces an antibody of claim 10.

16. A vaccine, comprising:
(1) one or more B. burgdorferi polypeptides selected from the group consisting of a polypeptide of claim 9; and
(2) a pharmaceutically acceptable diluent, carrier, or excipient;
wherein said polypeptide is present, in an amount effective to elicit protective antibodies in an animal to a member of the Borrelia genus.

17. A method of preventing or attenuating an infection caused by a member of the Borrelia genus in an animal, comprising administering to said animal a polypeptide of claim 9, wherein said polypeptide is administered in an amount effective to prevent or attenuate said infection.

18. A method of detecting Borrelia nucleic acids in a biological sample obtained from an animal, comprising a process selected from the group consisting of:
(a) contacting the sample with one or more nucleic acids of claim 1, under conditions such that hybridization occurs, and detecting hybridization of said nucleic acids to the one or more Borrelia nucleic acid sequences present in the biological sample; and
(b) amplifying one or more Borrelia nucleic acid sequences in said sample using polymerase chain reaction, and detecting said amplified Borrelia nucleic acid.

19. A kit for detecting Borrelia antibodies in a biological sample obtained from an animal, comprising
(a) a polypeptide of claim 9 attached to a solid support; and
(b) detecting means.

20. A method of detecting Borrelia antibodies in a biological sample obtained from an animal, comprising
(a) contacting the sample with a polypeptide of claim 9; and
(b) detecting antibody-antigen complexes.

The application's sequence listing, which the Patent Office published only in electronic form, follows.

SEQUENCE LISTING (756 sequences)

SEQ ID NO: 1 - protein, 216 aa, Borrelia burgdorferi
MSKIFLLFNAGFFFLKIIYVFSYPEIKNFSRQDPVFSDLKIKVLKYNKKQHIPLFFYSYKVKKGDTFFKIANKINGWQSGIATINLLDSPAVSVGQEILIPSKKGVFVFDSKDYRFNNLLLATRDLAKAEKVKIKRNDRVYEFYFFDFVKNPDFGLFSGTELLFFLNANFIFPLKKFIVSSDFGFRNDPFTGNKSFHTGIDLAAPMNAEVYLLLLE

SEQ ID NO: 2 - protein, 195 aa, Borrelia burgdorferi
SYPEIKNFSRQDPVFSDLKIKVLKYNKKQHIPLFFYSYKVKKGDTFFKIANKINGWQSGIATINLLDSPAVSVGQEILIPSKKGVFVFDSKDYRFNNLLLATRDLAKAEKVKIKRNDRVYEFYFFDFVKNPDFGLFSGTELLFFLNANFIFPLKKFIVSSDFGFRNDPFTGNKSFHTGIDLAAPMNAEVYLLLLE

SEQ ID NO: 3 - DNA, 651 bp, Borrelia burgdorferi
atgagtaaaatttttttattatttaatgcaggtttcttttttttaaaaataatttatgttttttcttatccagaaataaaaaatttctcaaggcaagatcctgttttttctgatcttaaaattaaagttttaaaatataacaaaaaacaacatattcctctgtttttttactcatataaagttaaaaaaggggatactttttttaaaattgccaataaaataaatggatggcagtccggcattgctactattaatttattagattctcctgctgtgagtgttgggcaagagattcttattcccagtaaaaaaggagtttttgtttttgatagtaaagattatagatttaataatttgcttttagcaacaagggatcttgctaaagctgaaaaggtaaaaattaaaaggaacgacagagtttatgaattttatttttttgattttgttaagaatccagattttggacttttttcaggcacagaattgctttttttcttaaatgccaattttatttttcctttaaaaaaatttattgttagttctgattttggatttagaaatgaccctttcactggcaacaaaagtttccatacaggaatagatcttgcagctccaatgaatgctgaagtgtatcttcttcttctggaatag

SEQ ID NO: 4 - DNA, 588 bp, Borrelia burgdorferi
tcttatccagaaataaaaaatttctcaaggcaagatcctgttttttctgatcttaaaattaaagttttaaaatataacaaaaaacaacatattcctctgtttttttactcatataaagttaaaaaaggggatactttttttaaaattgccaataaaataaatggatggcagtccggcattgctactattaatttattagattctcctgctgtgagtgttgggcaagagattcttattcccagtaaaaaaggagtttttgtttttgatagtaaagattatagatttaataatttgcttttagcaacaagggatcttgctaaagctgaaaaggtaaaaattaaaaggaacgacagagtttatgaattttatttttttgattttgttaagaatccagattttggacttttttcaggcacagaattgctttttttcttaaatgccaattttatttttcctttaaaaaaatttattgttagttctgattttggatttagaaatgaccctttcactggcaacaaaagtttccatacaggaatagatcttgcagctccaatgaatgctgaagtgtatcttcttcttctggaatag

SEQ ID NO: 5 - protein, 169 aa, Borrelia burgdorferi
VKKYIKTIFLISMVYFYCCTTIKINHDYETDFKVLESPSKYINIDVIKATNEYIYIQITNNSLDVVKINWQNTSLNNDKIVLKKEDLTINNETGYKNKYREFFIGPKTSFKFKVYPLKIHSKNKNSNNLSSTIKYPSIFKLNITKVGIEAKKTINVLITRTTKINITNK

SEQ ID NO: 6 - protein, 152 aa, Borrelia burgdorferi
CCTTIKINHDYETDFKVLESPSKYINIDVIKATNEYIYIQITNNSLDVVKINWQNTSLNNDKIVLKKEDLTINNETGYKNKYREFFIGPKTSFKFKVYPLKIHSKNKNSNNLSSTIKYPSIFKLNITKVGIEAKKTINVLITRTTKINITNK

SEQ ID NO: 7 - DNA, 585 bp, Borrelia burgdorferi
gtggaaaaatttcttttattccaggaaatgaaaatattgcagatcttggttttcataaaactaagtagaaatattgtcaaaaaatacataaaaacaatatttctgatttcaatggtttatttttattgttgtacgacaataaaaataaaccatgattatgaaactgattttaaagttctagaatctccctctaaatacatcaatatagatgtaattaaagctacaaatgaatatatttatattcaaattacaaacaatagcttagacgtagtaaaaataaattggcaaaacactagtcttaacaacgataagatcgtcttaaaaaaagaagatcttacaataaacaatgaaacagggtataaaaataaatacagagagttttttattggtcctaaaacttcatttaaatttaaagtatatccactaaaaattcattctaaaaacaaaaatagcaataacttaagctcaactattaaatatccgtctatttttaagctcaacataacaaaagtaggaattgaagcaaaaaaaacaataaatgttttaataacaagaactacaaaaattaatattactaataaatga

SEQ ID NO: 8 - DNA, 459 bp, Borrelia burgdorferi
tgttgtacgacaataaaaataaaccatgattatgaaactgattttaaagttctagaatctccctctaaatacatcaatatagatgtaattaaagctacaaatgaatatatttatattcaaattacaaacaatagcttagacgtagtaaaaataaattggcaaaacactagtcttaacaacgataagatcgtcttaaaaaaagaagatcttacaataaacaatgaaacagggtataaaaataaatacagagagttttttattggtcctaaaacttcatttaaatttaaagtatatccactaaaaattcattctaaaaacaaaaatagcaataacttaagctcaactattaaatatccgtctatttttaagctcaacataacaaaagtaggaattgaagcaaaaaaaacaataaatgttttaataacaagaactacaaaaattaatattactaataaatga

SEQ ID NO: 9 - protein, 1146 aa, Borrelia burgdorferi
MREFLYRNVFKKSFIVFLIFLTFSNAIFAQTIDDENSKKRDKLTLSQKSYLRELELSTDEDLKKWALKEGLKETDVSKIRELLLKKFGIDPELFIKGKGLAGSGRYKIIIETADNLENFTYGLTKDESIIFEGRVNILVEDIKENKKHNIKGDRIVLNKNSKKLYAIGNVEYILDMDTNEKLYFYGNEFLVDFDSQNFLLKNGILQKKMQKNQIDHILSFGGKVLKKIDNDVTILEQAFATTSKIPEPYYSIKASKIWALPSGDFGFLNAIFYMGRVPVFYIPFFFRPGDSLFFNPSLGLNPRKGFSVFNTVYLFGNKSSSEDSSFLDFDFNSVYNSGKKPYIRNGYLTYFFAENLAPSVNKDYVKLIFDIYANLGFYSGIDFNLGNTLGHFKTLEGNFGLGFTRNVYSYDGGYYPFDNRTLKQSLFSFSNLNKGDVFGFEVPFRYLFKFKTEFLLSDALFSVVLEHYSDPYVNIDFRDRIESATFFSLLNLDKDSVKEQTSISTFDWNLSSFYKRTFNDGSILDYKLNNLGLSFKLSGYENLYVKSPLEKPKDVNDPTRKWFYLERIYAPYIDLNFQKDLYNNQWTFPADTKEMIMRPEIKNLEDKDNDKKSVKEKNTKKTTELTKDLYIPPEPITLKNIDQSDSFFIRFGINPYLRNNVFFDNYGITSPKDFNYEIKNYLFDIKNKTDIKIHADFYNRLITFENLLYLNTIEYSPLNKDFKVEDKDKKSEHSIINQINLNLLPFIRYPLFSRSTLKFENKATLYSFNKKYDSDVKSLVNKNSSIFLSDPETFYQSLTASLIYDYDYFTTELSGELKNSFEDIKASSELKLSLDFPYLLQEAGIGIKYYKKFKEDAMKNSGISAVQSPLEPQKPSSPYKNLEMSPALYYKIEPRYLDYFKFSFLVAYDPLINRVSELSFKLNVFDFQFLFAMKDDFEYNYDPLKGDFSKIGTTTKLVPYSLDSSYKKELYVLTFFDNKLSFTLGVDVGWKINLQKFTDNELRSALTLKFKYTEFLEIYFSTLSINTKTFKYFKGYMDQIGLEPVNFFVDLSKSFNFFNSQDRKDSLFKIKKFSSGFKFNFYDWKFVGEYNLEPDLLRGSDGIYSPIWRNNFTIYISWNFFAPIKASFENNKDTNYEFIINRKTKK

SEQ ID NO: 10 - protein, 1120 aa, Borrelia burgdorferi
IFAQTIDDENSKKRDKLTLSQKSYLRELELSTDEDLKKWALKEGLKETDVSKIRELLLKKFGIDPELFIKGKGLAGSGRYKIIIETADNLENFTYGLTKDESIIFEGRVNILVEDIKENKKHNIKGDRIVLNKNSKKLYAIGNVEYILDMDTNEKLYFYGNEFLVDFDSQNFLLKNGILQKKMQKNQIDHILSFGGKVLKKIDNDVTILEQAFATTSKIPEPYYSIKASKIWALPSGDFGFLNAIFYMGRVPVFYIPFFFRPGDSLFFNPSLGLNPRKGFSVFNTVYLFGNKSSSEDSSFLDFDFNSVYNSGKKPYIRNGYLTYFFAENLAPSVNKDYVKLIFDIYANLGFYSGIDFNLGNTLGHFKTLEGNFGLGFTRNVYSYDGGYYPFDNRTLKQSLFSFSNLNKGDVFGFEVPFRYLFKFKTEFLLSDALFSVVLEHYSDPYVNIDFRDRIESATFFSLLNLDKDSVKEQTSISTFDWNLSSFYKRTFNDGSILDYKLNNLGLSFKLSGYENLYVKSPLEKPKDVNDPTRKWFYLERIYAPYIDLNFQKDLYNNQWTFPADTKEMIMRPEIKNLEDKDNDKKSVKEKNTKKTTELTKDLYIPPEPITLKNIDQSDSFFIRFGINPYLRNNVFFDNYGITSPKDFNYEIKNYLFDIKNKTDIKIHADFYNRLITFENLLYLNTIEYSPLNKDFKVEDKDKKSEHSIINQINLNLLPFIRYPLFSRSTLKFENKATLYSFNKKYDSDVKSLVNKNSSIFLSDPETFYQSLTASLIYDYDYFTTELSGELKNSFEDIKASSELKLSLDFPYLLQEAGIGIKYYKKFKEDAMKNSGISAVQSPLEPQKPSSPYKNLEMSPALYYKIEPRYLDYFKFSFLVAYDPLINRVSELSFKLNVFDFQFLFAMKDDFEYNYDPLKGDFSKIGTTTKLVPYSLDSSYKKELYVLTFFDNKLSFTLGVDVGWKINLQKFTDNELRSALTLKFKYTEFLEIYFSTLSINTKTFKYFKGYMDQIGLEPVNFFVDLSKSFNFFNSQDRKDSLFKIKKFSSGFKFNFYDWKFVGEYNLEPDLLRGSDGIYSPIWRNNFTIYISWNFFAPIKASFENNKDTNYEFIINRKTKK

SEQ ID NO: 11 - DNA, 3441 bp, Borrelia burgdorferi
atgcgagaattcctatacaggaatgtttttaaaaaatcttttatagtatttttaatttttttaacattttctaatgcaatttttgcccagactatagatgatgaaaattctaaaaaaagggataagctaactttaagtcaaaaatcttatttaagagaacttgagctttcaaccgatgaggatttaaaaaaatgggccttaaaagagggtttaaaagaaacagatgtttcaaaaatacgagaattgcttttaaaaaagtttggaatagatcctgagctttttatcaaaggaaagggacttgccggatctggtagatataaaataatcattgaaactgcagataatcttgaaaatttcacttatggacttactaaagatgaaagtattatttttgaaggaagagttaatatcttggttgaagatattaaagaaaataaaaagcacaatattaaaggcgacagaatagtccttaataagaactctaaaaaactttatgctattggaaatgttgaatatattcttgatatggataccaatgaaaagctttatttttatggcaatgaatttcttgtcgattttgattctcaaaattttttattaaaaaatggtattcttcaaaaaaaaatgcaaaaaaatcaaatagatcatattctttcgtttggaggaaaggttttaaaaaagatagacaatgatgttaccattttggaacaagcttttgcaacaactagtaaaattccagagccttactattcaatcaaggcttctaaaatatgggcattgccctcgggagattttgggtttttaaatgccatattttacatgggaagagttccagtattttatattcctttttttttcagaccgggagatagtttgttttttaatccatctttaggtctaaatccacgaaaaggtttttctgtttttaataccgtttatctttttggtaataaatcttcaagtgaagattcttcttttttggattttgatttcaattctgtttataattcgggtaaaaaaccttatataagaaatggatatttaacttatttttttgcagaaaatttagcacccagtgttaataaagattatgttaagcttatttttgacatttatgctaatctgggattttattctggaattgattttaatttgggcaatactttggggcattttaaaactttggaaggaaattttggattgggttttaccaggaatgtttatagttacgatggaggatattatccttttgataataggactttaaaacaatctctttttagtttttccaatcttaacaaaggagatgtatttgggtttgaagttccttttagatatttatttaaatttaaaacagaatttcttttaagtgatgcacttttctcggttgttttagagcactattctgacccgtatgttaatattgattttagagataggatagaaagtgctacatttttttctcttttaaatttagataaagattcggttaaagagcaaactagcattagcacttttgattggaatttatcttctttttataagcgaacatttaatgacggttcgattttagattataaattaaataatttaggtttaagttttaaattgtcgggctatgaaaatctttatgttaaatctcctttagagaaaccaaaagatgttaatgatcctacaagaaaatggttttatttggagagaatttatgctccatatattgatttgaattttcaaaaagatctttacaataaccaatggacatttccagctgatactaaagaaatgataatgcgcccagaaattaaaaatctagaagataaagataatgataaaaagagtgtgaaggagaaaaatactaaaaaaacaacagaattaaccaaagatttatatattcctccagaaccaattactttaaaaaatattgatcaatccgattctttttttattaggtttggcattaatccttatttaagaaataatgttttttttgataattatggcataacaagtccaaaggactttaattatgaaataaaaaattatttatttgatataaaaaataaaacggatataaaaattcatgctgatttttacaatcgtttaattacttttgaaaatttattatatcttaatactattgagtatagtcctttaaataaagattttaaagttgaagataaagataaaaaaagtgagcactctattattaaccaaataaatttaaacttgcttccttttattagatatcctttattttctagaagtactttaaagtttgaaaataaggctactttatattcatttaataaaaaatatgattctgatgtaaaatctttggttaataagaatagtagtatttttttatctgatccggaaactttttatcaaagtttaacagcctctttaatttatgattatgattattttactactgagctttcaggtgaattaaaaaatagttttgaagatattaaagcttcttctgagcttaaactttctttagattttccttatttgctacaagaagctgggattggaattaaatattataaaaagtttaaagaagatgctatgaaaaactctggaatttctgctgttcaaagtcctttggagcctcaaaaaccatcatcgccttataaaaatttagaaatgtctcctgctttgtattataaaattgagccgagatatttggattattttaaatttagttttttagtcgcctatgatcctttgataaatagagtttctgaactttcttttaagcttaatgtttttgattttcaatttttgtttgctatgaaagacgactttgaatataattatgatcctttaaaaggagatttttccaagattggtactacaaccaaacttgttccatattctttagattctagttacaaaaaggaattgtacgttttaactttttttgacaataagctttcttttaccttgggggtagatgttggttggaaaataaatttgcagaaatttacggataatgaacttcgatctgcattgactttgaagtttaaatatacagaatttttagaaatttacttttctactttatctattaatactaagacttttaaatattttaaagggtatatggaccaaattggtctagaacctgttaatttctttgttgatttatcaaaatctttcaatttctttaattctcaagacagaaaagattcactttttaaaattaaaaaattttcatcaggctttaaattcaatttttatgattggaaatttgttggagaatataatttagaaccagatttattaaggggatctgatgggatttattctcctatttggagaaataattttacaatttatatttcttggaacttttttgctcctataaaagcgtcatttgaaaacaacaaagatacaaactacgagtttattattaatagaaaaacaaaaaaataa

SEQ ID NO: 12 - DNA, 3363 bp, Borrelia burgdorferi
atttttgcccagactatagatgatgaaaattctaaaaaaagggataagctaactttaagtcaaaaatcttatttaagagaacttgagctttcaaccgatgaggatttaaaaaaatgggccttaaaagagggtttaaaagaaacagatgtttcaaaaatacgagaattgcttttaaaaaagtttggaatagatcctgagctttttatcaaaggaaagggacttgccggatctggtagatataaaataatcattgaaactgcagataatcttgaaaatttcacttatggacttactaaagatgaaagtattatttttgaaggaagagttaatatcttggttgaagatattaaagaaaataaaaagcacaatattaaaggcgacagaatagtccttaataagaactctaaaaaactttatgctattggaaatgttgaatatattcttgatatggataccaatgaaaagctttatttttatggcaatgaatttcttgtcgattttgattctcaaaattttttattaaaaaatggtattcttcaaaaaaaaatgcaaaaaaatcaaatagatcatattctttcgtttggaggaaaggttttaaaaaagatagacaatgatgttaccattttggaacaagcttttgcaacaactagtaaaattccagagccttactattcaatcaaggcttctaaaatatgggcattgccctcgggagattttgggtttttaaatgccatattttacatgggaagagttccagtattttatattcctttttttttcagaccgggagatagtttgttttttaatccatctttaggtctaaatccacgaaaaggtttttctgtttttaataccgtttatctttttggtaataaatcttcaagtgaagattcttcttttttggattttgatttcaattctgtttataattcgggtaaaaaaccttatataagaaatggatatttaacttatttttttgcagaaaatttagcacccagtgttaataaagattatgttaagcttatttttgacatttatgctaatctgggattttattctggaattgattttaatttgggcaatactttggggcattttaaaactttggaaggaaattttggattgggttttaccaggaatgtttatagttacgatggaggatattatccttttgataataggactttaaaacaatctctttttagtttttccaatcttaacaaaggagatgtatttgggtttgaagttccttttagatatttatttaaatttaaaacagaatttcttttaagtgatgcacttttctcggttgttttagagcactattctgacccgtatgttaatattgattttagagataggatagaaagtgctacatttttttctcttttaaatttagataaagattcggttaaagagcaaactagcattagcacttttgattggaatttatcttctttttataagcgaacatttaatgacggttcgattttagattataaattaaataatttaggtttaagttttaaattgtcgggctatgaaaatctttatgttaaatctcctttagagaaaccaaaagatgttaatgatcctacaagaaaatggttttatttggagagaatttatgctccatatattgatttgaattttcaaaaagatctttacaataaccaatggacatttccagctgatactaaagaaatgataatgcgcccagaaattaaaaatctagaagataaagataatgataaaaagagtgtgaaggagaaaaatactaaaaaaacaacagaattaaccaaagatttatatattcctccagaaccaattactttaaaaaatattgatcaatccgattctttttttattaggtttggcattaatccttatttaagaaataatgttttttttgataattatggcataacaagtccaaaggactttaattatgaaataaaaaattatttatttgatataaaaaataaaacggatataaaaattcatgctgatttttacaatcgtttaattacttttgaaaatttattatatcttaatactattgagtatagtcctttaaataaagattttaaagttgaagataaagataaaaaaagtgagcactctattattaaccaaataaatttaaacttgcttccttttattagatatcctttattttctagaagtactttaaagtttgaaaataaggctactttatattcatttaataaaaaatatgattctgatgtaaaatctttggttaataagaatagtagtatttttttatctgatccggaaactttttatcaaagtttaacagcctctttaatttatgattatgattattttactactgagctttcaggtgaattaaaaaatagttttgaagatattaaagcttcttctgagcttaaactttctttagattttccttatttgctacaagaagctgggattggaattaaatattataaaaagtttaaagaagatgctatgaaaaactctggaatttctgctgttcaaagtcctttggagcctcaaaaaccatcatcgccttataaaaatttagaaatgtctcctgctttgtattataaaattgagccgagatatttggattattttaaatttagttttttagtcgcctatgatcctttgataaatagagtttctgaactttcttttaagcttaatgtttttgattttcaatttttgtttgctatgaaagacgactttgaatataattatgatcctttaaaaggagatttttccaagattggtactacaaccaaacttgttccatattctttagattctagttacaaaaaggaattgtacgttttaactttttttgacaataagctttcttttaccttgggggtagatgttggttggaaaataaatttgcagaaatttacggataatgaacttcgatctgcattgactttgaagtttaaatatacagaatttttagaaatttacttttctactttatctattaatactaagacttttaaatattttaaagggtatatggaccaaattggtctagaacctgttaatttctttgttgatttatcaaaatctttcaatttctttaattctcaagacagaaaagattcactttttaaaattaaaaaattttcatcaggctttaaattcaatttttatgattggaaatttgttggagaatataatttagaaccagatttattaaggggatctgatgggatttattctcctatttggagaaataattttacaatttatatttcttggaacttttttgctcctataaaagcgtcatttgaaaacaacaaagatacaaactacgagtttattattaatagaaaaacaaaaaaataa

SEQ ID NO: 13 - protein, 195 aa, Borrelia burgdorferi
MTKKLFVRVLIFLISNNYAFAKDTIKDLFFIQDILIKKEKYSEVLNNASLEGIIEIEHNGPYIKDHDSEVKLILKENGYRRNFNFFNLLNTSNIIKSLSLFDSRPKNIKENEIILLETKMIKENPYKRYKDDDDFELKLSVTRKNNQIYLILDFNFLFDQRKTFPSIYIKEEDVSTIINSFMKLQDSSFLSPQAS

SEQ ID NO: 14 - protein, 174 aa, Borrelia burgdorferi
KDTIKDLFFIQDILIKKEKYSEVLNNASLEGIIEIEHNGPYIKDHDSEVKLILKENGYRRNFNFFNLLNTSNIIKSLSLFDSRPKNIKENEIILLETKMIKENPYKRYKDDDDFELKLSVTRKNNQIYLILDFNFLFDQRKTFPSIYIKEEDVSTIINSFMKLQDSSFLSPQAS

SEQ ID NO: 15 - DNA, 588 bp, Borrelia burgdorferi
atgacaaaaaaattgtttgtgagggtattaatctttttaatatccaataattatgcttttgcaaaagacacaatcaaagatttgttctttatacaagatatactaataaaaaaagagaaatattccgaggttctaaataatgcaagccttgaaggcattattgaaattgaacataacggaccatacattaaagatcacgattcagaagttaaacttatcctaaaagaaaacggatatagaagaaatttcaacttttttaatcttttaaatactagtaatataatcaaaagtctaagcttatttgacagcagaccaaaaaacattaaagaaaatgaaatcatattattagagacaaaaatgattaaagaaaatccctataaacgatacaaagacgatgatgattttgaattaaaactaagtgtaactcgaaaaaataatcaaatttatttaattcttgatttcaatttcctatttgatcaaagaaaaacgtttccatcaatttacatcaaagaagaagatgtatcaacaataataaacagcttcatgaaactacaagattcaagctttttatctcctcaagcttcttaa

SEQ ID NO: 16 - DNA, 525 bp, Borrelia burgdorferi
aaagacacaatcaaagatttgttctttatacaagatatactaataaaaaaagagaaatattccgaggttctaaataatgcaagccttgaaggcattattgaaattgaacataacggaccatacattaaagatcacgattcagaagttaaacttatcctaaaagaaaacggatatagaagaaatttcaacttttttaatcttttaaatactagtaatataatcaaaagtctaagcttatttgacagcagaccaaaaaacattaaagaaaatgaaatcatattattagagacaaaaatgattaaagaaaatccctataaacgatacaaagacgatgatgattttgaattaaaactaagtgtaactcgaaaaaataatcaaatttatttaattcttgatttcaatttcctatttgatcaaagaaaaacgtttccatcaatttacatcaaagaagaagatgtatcaacaataataaacagcttcatgaaactacaagattcaagctttttatctcctcaagcttcttaa

SEQ ID NO: 17 - protein, 463 aa, Borrelia burgdorferi
MDKISILYTLINIIIMLILISIVYLCKRKNVSFTKRVFIALAIGIVFGMTIQYFYGTNSEITNETINWISILGDGYVRLLKMIIIPLIITSIISAIIKLTNSKDVGKMSLLVILTLVFTAGIAAIIGIFTALALGLTAEGLQAGTIEILQSEKLQKGLEILNQTTITKKITDLIPQNIFEDFAGLRKNSTIGVVIFSAIIGIAALKTSIKKPESIEFFKKIILTLQDIILGVVTLILKLTPYAILALMTKITATSEIKSIIKLGEFVIASYIAIGLTFLMHMTLIAINKLNPITFIKKIFPALSFAFISRSSAATIPINIEIQTKNLGVSEGIANLSSSFGTSIGQNGCAALHPAMLAIMIAPTQGINPTDISFILTLIGLIIITSFGAAGAGGGATTASLMVLSAMNFPVGLVGLVISVEPIIDMGRTAVNVGGSMLAGVISAKQLKQFNHNIYNQKELVNK

SEQ ID NO: 18 - protein, 438 aa, Borrelia burgdorferi
CKRKNVSFTKRVFIALAIGIVFGMTIQYFYGTNSEITNETINWISILGDGYVRLLKMIIIPLIITSIISAIIKLTNSKDVGKMSLLVILTLVFTAGIAAIIGIFTALALGLTAEGLQAGTIEILQSEKLQKGLEILNQTTITKKITDLIPQNIFEDFAGLRKNSTIGVVIFSAIIGIAALKTSIKKPESIEFFKKIILTLQDIILGVVTLILKLTPYAILALMTKITATSEIKSIIKLGEFVIASYIAIGLTFLMHMTLIAINKLNPITFIKKIFPALSFAFISRSSAATIPINIEIQTKNLGVSEGIANLSSSFGTSIGQNGCAALHPAMLAIMIAPTQGINPTDISFILTLIGLIIITSFGAAGAGGGATTASLMVLSAMNFPVGLVGLVISVEPIIDMGRTAVNVGGSMLAGVISAKQLKQFNHNIYNQKELVNK

SEQ ID NO: 19 - DNA, 1404 bp, Borrelia burgdorferi
taagaggtaataatggataaaataagtatattatatacattaatcaatattataataatgcttattctaataagcatagtttatctttgtaaaagaaaaaatgtttcttttacaaaaagagtgtttatagcgttagcaatcggaatagtatttggaatgaccattcaatatttttatggaacaaattcagaaataacaaacgaaactataaattggataagtattttgggcgatggatacgtaaggctccttaaaatgattataatccccttaataataacatcaataatctctgcaataataaaactaaccaatagtaaagatgttgggaaaatgagcctacttgtaatattaacactagtatttacagcaggtattgctgccataattggcattttcactgctttagcattgggattaacagccgaaggactacaagcgggaaccatcgaaattttacaaagtgaaaaattgcaaaaaggccttgaaatattaaatcaaacaacaatcacaaaaaaaatcacagatcttattccacaaaatatatttgaagattttgcagggcttagaaaaaactcaaccatcggggtcgtgatattttcagctatcataggaatagccgcccttaaaacatctatcaaaaagccagaatcaatagaattttttaaaaaaataatattaacactccaagacataatattaggtgtagtaactttgattttaaaactaacgccttatgctatattagctttaatgacaaaaattacagcaaccagcgaaatcaaaagcataataaagcttggagaatttgtaattgcttcctacattgccataggtcttacatttcttatgcatatgacattaattgcaataaataaattaaacccaattacttttataaaaaaaatattcccagcactatcatttgcattcatatctaggtcgagtgctgcaaccatacccattaatatagaaattcaaactaaaaatctgggagtaagcgaaggaatagcaaatttatcaagctcctttggaacatcaattgggcaaaatggttgtgcagcactacaccccgctatgcttgcaataatgatagcaccaactcagggaataaaccccacagatatttcatttatactcacacttattggattaataataataacttcatttggagctgctggcgctggtggaggcgcaacaacagcctcactaatggtgctctcagcaatgaactttccagtgggattggtaggacttgtaatatctgttgagcctataattgacatgggaagaacagctgttaatgtaggcggctcaatgcttgcaggcgttatatctgctaaacagctcaaacaattcaaccataatatatacaaccaaaaagagcttgtaaacaaataa

SEQ ID NO: 20 - DNA, 1317 bp, Borrelia burgdorferi
tgtaaaagaaaaaatgtttcttttacaaaaagagtgtttatagcgttagcaatcggaatagtatttggaatgaccattcaatatttttatggaacaaattcagaaataacaaacgaaactataaattggataagtattttgggcgatggatacgtaaggctccttaaaatgattataatccccttaataataacatcaataatctctgcaataataaaactaaccaatagtaaagatgttgggaaaatgagcctacttgtaatattaacactagtatttacagcaggtattgctgccataattggcattttcactgctttagcattgggattaacagccgaaggactacaagcgggaaccatcgaaattttacaaagtgaaaaattgcaaaaaggccttgaaatattaaatcaaacaacaatcacaaaaaaaatcacagatcttattccacaaaatatatttgaagattttgcagggcttagaaaaaactcaaccatcggggtcgtgatattttcagctatcataggaatagccgcccttaaaacatctatcaaaaagccagaatcaatagaattttttaaaaaaataatattaacactccaagacataatattaggtgtagtaactttgattttaaaactaacgccttatgctatattagctttaatgacaaaaattacagcaaccagcgaaatcaaaagcataataaagcttggagaatttgtaattgcttcctacattgccataggtcttacatttcttatgcatatgacattaattgcaataaataaattaaacccaattacttttataaaaaaaatattcccagcactatcatttgcattcatatctaggtcgagtgctgcaaccatacccattaatatagaaattcaaactaaaaatctgggagtaagcgaaggaatagcaaatttatcaagctcctttggaacatcaattgggcaaaatggttgtgcagcactacaccccgctatgcttgcaataatgatagcaccaactcagggaataaaccccacagatatttcatttatactcacacttattggattaataataataacttcatttggagctgctggcgctggtggaggcgcaacaacagcctcactaatggtgctctcagcaatgaactttccagtgggattggtaggacttgtaatatctgttgagcctataattgacatgggaagaacagctgttaatgtaggcggctcaatgcttgcaggcgttatatctgctaaacagctcaaacaattcaaccataatatatacaaccaaaaagagcttgtaaacaaataa

SEQ ID NO: 21 - protein, 443 aa, Borrelia burgdorferi
MKIIIIGGTSAGTSAAAKANRLNKKLDITIYEKTNIVSFGTCGLPYFVGGFFDNPNTMISRTQEEFEKTGISVKTNHEVIKVDAKNNTIVIKNQKTGTIFNNTYDQLMIATGAKPIIPPINNINLENFHTLKNLEDGQKIKKLMDREEIKNIVIIGGGYIGIEMVEAAKNKRKNVRLIQLDKHILIDSFDEEIVTIMEEELTKKGVNLHTNEFVKSLIGEKKAEGVVTNKNTYQADAVILATGIKPDTEFLENQLKTTKNGAIIVNEYGETSIKNIFSAGDCATIYNIVSKKNEYIPLATTANKLGRIVGENLAGNHTAFKGTLGSASIKILSLEAARTGLTEKDAKKLQIKYKTIFVKDKNHTNYYPGQEDLYIKLIYEENTKIILGAQAIGKNGAVIRIHALSIAIYSKLTTKELGMMDFSYSPPFSRTWDILNIAGNAAK

SEQ ID NO: 22 - protein, 429 aa, Borrelia burgdorferi
AAAKANRLNKKLDITIYEKTNIVSFGTCGLPYFVGGFFDNPNTMISRTQEEFEKTGISVKTNHEVIKVDAKNNTIVIKNQKTGTIFNNTYDQLMIATGAKPIIPPINNINLENFHTLKNLEDGQKIKKLMDREEIKNIVIIGGGYIGIEMVEAAKNKRKNVRLIQLDKHILIDSFDEEIVTIMEEELTKKGVNLHTNEFVKSLIGEKKAEGVVTNKNTYQADAVILATGIKPDTEFLENQLKTTKNGAIIVNEYGETSIKNIFSAGDCATIYNIVSKKNEYIPLATTANKLGRIVGENLAGNHTAFKGTLGSASIKILSLEAARTGLTEKDAKKLQIKYKTIFVKDKNHTNYYPGQEDLYIKLIYEENTKIILGAQAIGKNGAVIRIHALSIAIYSKLTTKELGMMDFSYSPPFSRTWDILNIAGNAAK

SEQ ID NO: 23 - DNA, 1332 bp, Borrelia burgdorferi
atgaaaataataattattgggggcacatcagcaggaactagtgccgcagctaaagcaaaccgcttaaacaaaaagctagacattactatctatgaaaaaacaaatattgtatcttttggaacctgtggcctgccttactttgtggggggattctttgacaaccccaatacaatgatctcaagaacacaagaagaattcgaaaaaactggaatctctgttaaaactaaccacgaagttatcaaagtagatgcaaaaaacaatacaattgtaataaaaaatcaaaaaacaggaaccatttttaacaatacttacgatcaacttatgatagcaactggtgcaaaacctattattccaccaatcaataatatcaatctagaaaattttcatactctgaaaaatttagaagacggtcaaaaaataaaaaaattaatggatagagaagagattaaaaatatagtgataattggtggtggatacattggaattgaaatggtagaagcagcaaaaaataaaagaaaaaatgtaagattaattcaactagataagcacatactcatagattcctttgacgaagaaatagtcacaataatggaagaagaactaacaaaaaagggggttaatcttcatacaaatgagtttgtaaaaagtttaataggagaaaaaaaggcagaaggagtagtaacaaacaaaaatacttatcaagctgacgctgttatacttgctaccggaataaaacctgacactgaatttttagaaaaccagcttaaaactactaaaaatggagcaataattgtaaatgagtatggcgaaactagcataaaaaatattttttctgcaggagattgtgcaactatttataatatagtaagtaaaaaaaatgaatacatacccttggcaacaacagccaacaaacttggaagaatagttggtgaaaatttagctgggaatcatacagcatttaaaggcacattgggctcagcttcaattaaaatactatctttagaagctgcaagaacaggacttacagaaaaagatgcaaaaaagctccaaataaaatataaaacgatttttgtaaaggacaaaaatcatacaaattattatccaggccaagaagatctttatattaaattaatttatgaggaaaataccaaaataatccttggggcacaagcaataggaaaaaatggagccgtaataagaattcatgctttatcaattgcaatctattcaaaacttacaacaaaagagctagggatgatggatttctcatattccccacccttctcaagaacttgggatatattaaatattgctggcaatgctgccaaatag

SEQ ID NO: 24 - DNA, 1290 bp, Borrelia burgdorferi
gccgcagctaaagcaaaccgcttaaacaaaaagctagacattactatctatgaaaaaacaaatattgtatcttttggaacctgtggcctgccttactttgtggggggattctttgacaaccccaatacaatgatctcaagaacacaagaagaattcgaaaaaactggaatctctgttaaaactaaccacgaagttatcaaagtagatgcaaaaaacaatacaattgtaataaaaaatcaaaaaacaggaaccatttttaacaatacttacgatcaacttatgatagcaactggtgcaaaacctattattccaccaatcaataatatcaatctagaaaattttcatactctgaaaaatttagaagacggtcaaaaaataaaaaaattaatggatagagaagagattaaaaatatagtgataattggtggtggatacattggaattgaaatggtagaagcagcaaaaaataaaagaaaaaatgtaagattaattcaactagataagcacatactcatagattcctttgacgaagaaatagtcacaataatggaagaagaactaacaaaaaagggggttaatcttcatacaaatgagtttgtaaaaagtttaataggagaaaaaaaggcagaaggagtagtaacaaacaaaaatacttatcaagctgacgctgttatacttgctaccggaataaaacctgacactgaatttttagaaaaccagcttaaaactactaaaaatggagcaataattgtaaatgagtatggcgaaactagcataaaaaatattttttctgcaggagattgtgcaactatttataatatagtaagtaaaaaaaatgaatacatacccttggcaacaacagccaacaaacttggaagaatagttggtgaaaatttagctgggaatcatacagcatttaaaggcacattgggctcagcttcaattaaaatactatctttagaagctgcaagaacaggacttacagaaaaagatgcaaaaaagctccaaataaaatataaaacgatttttgtaaaggacaaaaatcatacaaattattatccaggccaagaagatctttatattaaattaatttatgaggaaaataccaaaataatccttggggcacaagcaataggaaaaaatggagccgtaataagaattcatgctttatcaattgcaatctattcaaaacttacaacaaaagagctagggatgatggatttctcatattccccacccttctcaagaacttgggatatattaaatattgctggcaatgctgccaaatag

SEQ ID NO: 25 - protein, 440 aa, Borrelia burgdorferi
MLKFEFSDRFLLFSYFVLIMFIGSLLLMLPISWEGDGKLAYIDALFTAVSAVSITGLTTVKMEGFSTFGFILIMLLIQLGGLGFISITTFYLLIPKKKMNLTDARIIKQYSLSNIEYNPIRILKSILFITFSIEMIGLILILICFKLRGVNISFLEALFTTISAFCNAGFSMHSESIYAWRDVPEAIVVVSILIICGGLGFMVYRDVNNTIKNKKKLSLHAKIVFSLSFFLIIIGAILFFFTEMHKLKAGYSMSTLIFNSIFYSISTRTAGFNYLDNSLISGRTQIISLPFMFIGGAPGSTAGGIKITTFFLIVLAVVKNQNGNGYIIGSYKVSIDSIRFALLFFARAIFILSFSFFMLLFFEGGSGNWKVIDLGYEVFSAFGTVGLSVGVTQDLSFWGKVIIIFTMFAGRIGLFSMAVFVSRKSRFEEFTRPRQDILVG

SEQ ID NO: 26 - protein, 408 aa, Borrelia burgdorferi
WEGDGKLAYIDALFTAVSAVSITGLTTVKMEGFSTFGFILIMLLIQLGGLGFISITTFYLLIPKKKMNLTDARIIKQYSLSNIEYNPIRILKSILFITFSIEMIGLILILICFKLRGVNISFLEALFTTISAFCNAGFSMHSESIYAWRDVPEAIVVVSILIICGGLGFMVYRDVNNTIKNKKKLSLHAKIVFSLSFFLIIIGAILFFFTEMHKLKAGYSMSTLIFNSIFYSISTRTAGFNYLDNSLISGRTQIISLPFMFIGGAPGSTAGGIKITTFFLIVLAVVKNQNGNGYIIGSYKVSIDSIRFALLFFARAIFILSFSFFMLLFFEGGSGNWKVIDLGYEVFSAFGTVGLSVGVTQDLSFWGKVIIIFTMFAGRIGLFSMAVFVSRKSRFEEFTRPRQDILVG

SEQ ID NO: 27 - DNA, 1323 bp, Borrelia burgdorferi
atgttgaaatttgaatttagcgacaggtttttactttttagttattttgttttaattatgtttataggctctcttttgttgatgttgcctatttcctgggaaggtgatggcaaattagcatacattgatgctctttttactgctgtttctgctgtaagtattacgggccttacaacggttaaaatggaaggcttttctacttttggatttattttgataatgttgctaatccagcttgggggacttggatttataagtattactactttttatttgcttatacctaaaaagaaaatgaatttaacagatgcaagaataataaagcagtattccctttcaaatatagaatataatcctattagaattttaaaaagcatattgtttataactttttcaattgaaatgataggtttaatattaatacttatttgttttaaacttaggggagtgaatatttcattcttagaggctttgtttacgacaatttctgctttttgcaatgcaggtttttccatgcattctgagagtatttatgcatggcgagatgttcctgaagctatagttgtggtctctattttaataatttgtggtgggcttgggtttatggtctatagagatgtaaataacactattaaaaacaaaaaaaaactatcgcttcatgccaagatagttttttctttaagcttctttttaattataattggtgcaattttatttttttttacagagatgcataaattaaaagctggttattcaatgagcactttaatatttaattcaattttttattcgattagtaccagaacagctggttttaattatcttgataattctttaataagcggaagaactcaaataatttctctaccattcatgtttattggtggtgcacccggatcaactgcaggagggattaagattacaacattttttttaattgtattggctgttgttaaaaatcaaaacggcaatggatatattattggttcttacaaggtttcaatagatagtataagatttgcacttttattttttgcaagagctatttttattttaagtttttcttttttcatgcttcttttttttgagggaggatctggcaattggaaggttattgatttaggttatgaagtattttctgcttttggaacggttggtctttcagttggagtaactcaggatttgtcattttgggggaaagtcattataatttttactatgtttgcaggacgaatagggcttttttcaatggctgtttttgtttcaagaaagtcgcgttttgaagaatttacaaggccaaggcaagatattttggttggttga

SEQ ID NO: 28 - DNA, 1227 bp, Borrelia burgdorferi
tgggaaggtgatggcaaattagcatacattgatgctctttttactgctgtttctgctgtaagtattacgggccttacaacggttaaaatggaaggcttttctacttttggatttattttgataatgttgctaatccagcttgggggacttggatttataagtattactactttttatttgcttatacctaaaaagaaaatgaatttaacagatgcaagaataataaagcagtattccctttcaaatatagaatataatcctattagaattttaaaaagcatattgtttataactttttcaattgaaatgataggtttaatattaatacttatttgttttaaacttaggggagtgaatatttcattcttagaggctttgtttacgacaatttctgctttttgcaatgcaggtttttccatgcattctgagagtatttatgcatggcgagatgttcctgaagctatagttgtggtctctattttaataatttgtggtgggcttgggtttatggtctatagagatgtaaataacactattaaaaacaaaaaaaaactatcgcttcatgccaagatagttttttctttaagcttctttttaattataattggtgcaattttatttttttttacagagatgcataaattaaaagctggttattcaatgagcactttaatatttaattcaattttttattcgattagtaccagaacagctggttttaattatcttgataattctttaataagcggaagaactcaaataatttctctaccattcatgtttattggtggtgcacccggatcaactgcaggagggattaagattacaacattttttttaattgtattggctgttgttaaaaatcaaaacggcaatggatatattattggttcttacaaggtttcaatagatagtataagatttgcacttttattttttgcaagagctatttttattttaagtttttcttttttcatgcttcttttttttgagggaggatctggcaattggaaggttattgatttaggttatgaagtattttctgcttttggaacggttggtctttcagttggagtaactcaggatttgtcattttgggggaaagtcattataatttttactatgtttgcaggacgaatagggcttttttcaatggctgtttttgtttcaagaaagtcgcgttttgaagaatttacaaggccaaggcaagatattttggttggttga

SEQ ID NO: 29 - protein, 481 aa, Borrelia burgdorferi
MKINKTFILLFLFTKFSFVQAQANQILTEISPLSILSKNGKGSVYLKVSKSSDYILTLDKSSNSDFVFKIYDISNKKYITDKVKRRDFKIRLDKNSLYAIIYVGTKNENIKFSLTDLDFSILSSDSLKAKTSKIEKEDLFFTLKDLPVLNLTAKLKKYVLRIYKSNIYIAYQLENSDDIKVAEFIEDVGWFNLDSSVNRNITNIVNFDFSINSKGNLYIAFVTKSGADFASELIVKKFNSRKWIDISPGHIENFGSLLNISIDLKDRLYLAYLREIRGEYKINLISNMGYGSIWTDVIHAYLSKGDSNVNSSNIGLISEPFLGIFYNYKSNNEIKSEFIVNNENAWVNANIPSVYMANFIKGFFDSNFNQIIMSFVSENRPIVNICPLKSSRWINISPNVEMEGLSADIGLYKNNLFLAFEDNNNVRLIYFKNKNWYFLNKLENFKSNVKSPQIGIYGNQGLVISTLSSNSNELFFTLICQ

SEQ ID NO: 30 - protein, 458 aa, Borrelia burgdorferi
NQILTEISPLSILSKNGKGSVYLKVSKSSDYILTLDKSSNSDFVFKIYDISNKKYITDKVKRRDFKIRLDKNSLYAIIYVGTKNENIKFSLTDLDFSILSSDSLKAKTSKIEKEDLFFTLKDLPVLNLTAKLKKYVLRIYKSNIYIAYQLENSDDIKVAEFIEDVGWFNLDSSVNRNITNIVNFDFSINSKGNLYIAFVTKSGADFASELIVKKFNSRKWIDISPGHIENFGSLLNISIDLKDRLYLAYLREIRGEYKINLISNMGYGSIWTDVIHAYLSKGDSNVNSSNIGLISEPFLGIFYNYKSNNEIKSEFIVNNENAWVNANIPSVYMANFIKGFFDSNFNQIIMSFVSENRPIVNICPLKSSRWINISPNVEMEGLSADIGLYKNNLFLAFEDNNNVRLIYFKNKNWYFLNKLENFKSNVKSPQIGIYGNQGLVISTLSSNSNELFFTLICQ

SEQ ID NO: 31 - DNA, 1446 bp, Borrelia burgdorferi
atgaaaataaataagacattcattttgctatttttatttacaaaattttcttttgttcaagctcaagcaaatcaaatattaacagaaattagtcctttaagtattttaagcaaaaatgggaaaggaagtgtttacttaaaagttagcaaatcttccgattatattttaaccctagataagagttcaaattccgattttgtttttaaaatttatgacatttctaataaaaaatatataaccgataaagtaaaaagaagagattttaaaataagattagataaaaattctctttatgcaataatatatgttggtactaaaaatgaaaacataaagttttcgcttacagatttagatttttcaattttaagtagcgattccctgaaagctaaaacatctaagattgaaaaagaagatttattttttactttaaaagatttgcctgttttaaatttaactgccaagcttaaaaaatatgtattaaggatttataaaagcaatatttatattgcttatcagctagaaaatagcgatgatattaaagttgctgaatttattgaggatgttggttggtttaatcttgattcatctgttaatagaaatattactaatatagttaattttgatttttcaattaattctaaaggaaatttatatattgcttttgttacgaaatcaggggctgattttgccagcgagcttatagttaaaaaatttaatagtagaaaatggattgatattagtcctggtcacatagaaaattttggatctttattaaatattagcattgatttaaaagataggttgtatttagcatatttaagggaaattaggggtgaatataaaattaatttaatctcgaatatgggttacggaagtatttggaccgatgtaatacatgcttatttaagtaaaggtgattctaatgttaattcatcaaacattggtttaatatctgaaccttttttgggcattttttataattataagtcaaataatgagattaaatctgaatttattgtaaacaatgaaaatgcttgggtaaatgcaaatattccttctgtttatatggccaattttattaaaggcttttttgattctaattttaatcaaataattatgagttttgtttctgaaaatagacctattgtaaacatttgtcctttgaaaagtagtagatggattaatataagtcctaatgttgaaatggaaggtttaagtgctgacattgggctttataaaaataatttgtttttagcttttgaggacaataataatgtgagattaatttattttaagaataaaaattggtattttttaaataagcttgagaattttaagagtaatgttaaaagccctcagattggaatttatggcaatcaagggcttgtaatctctactttaagctctaattccaatgaattattttttactttgatttgccaatga

SEQ ID NO: 32 - DNA, 1377 bp, Borrelia burgdorferi
aatcaaatattaacagaaattagtcctttaagtattttaagcaaaaatgggaaaggaagtgtttacttaaaagttagcaaatcttccgattatattttaaccctagataagagttcaaattccgattttgtttttaaaatttatgacatttctaataaaaaatatataaccgataaagtaaaaagaagagattttaaaataagattagataaaaattctctttatgcaataatatatgttggtactaaaaatgaaaacataaagttttcgcttacagatttagatttttcaattttaagtagcgattccctgaaagctaaaacatctaagattgaaaaagaagatttattttttactttaaaagatttgcctgttttaaatttaactgccaagcttaaaaaatatgtattaaggatttataaaagcaatatttatattgcttatcagctagaaaatagcgatgatattaaagttgctgaatttattgaggatgttggttggtttaatcttgattcatctgttaatagaaatattactaatatagttaattttgatttttcaattaattctaaaggaaatttatatattgcttttgttacgaaatcaggggctgattttgccagcgagcttatagttaaaaaatttaatagtagaaaatggattgatattagtcctggtcacatagaaaattttggatctttattaaatattagcattgatttaaaagataggttgtatttagcatatttaagggaaattaggggtgaatataaaattaatttaatctcgaatatgggttacggaagtatttggaccgatgtaatacatgcttatttaagtaaaggtgattctaatgttaattcatcaaacattggtttaatatctgaaccttttttgggcattttttataattataagtcaaataatgagattaaatctgaatttattgtaaacaatgaaaatgcttgggtaaatgcaaatattccttctgtttatatggccaattttattaaaggcttttttgattctaattttaatcaaataattatgagttttgtttctgaaaatagacctattgtaaacatttgtcctttgaaaagtagtagatggattaatataagtcctaatgttgaaatggaaggtttaagtgctgacattgggctttataaaaataatttgtttttagcttttgaggacaataataatgtgagattaatttattttaagaataaaaattggtattttttaaataagcttgagaattttaagagtaatgttaaaagccctcagattggaatttatggcaatcaagggcttgtaatctctactttaagctctaattccaatgaattattttttactttgatttgccaatga

SEQ ID NO: 33 - protein, 454 aa, Borrelia burgdorferi
MKIFLKVIGRGILGRLMVFRKNYDYLALISLLIVSFVGILLIYSSDYNISGSLTKNEYIKQTFWVIIGFFLIFIVGKYDLKFVYSMVYPLYFLLILALIFTAFFGMTVNGARSWIGIWKLGGQPSEFGKVVIILTLSKFYTEKKGYNEFFTFITAFLLIFPSVILILLQPDFGTAIVYLTIFIFISFFAGIDLHYVLAFALIGFFSFVFAILPVWYEYKVNMGNVFYLIFSNPFYFRVIMGVLLLILLISVLGFFISKYGLSIKIIYFYVFFASSILLVSIVFSKVLSKLMKTYQIKRFLVFLDPAIDAKGAGWNLNQVKIAIGSGGLLGKGFLKGPYTHANYVPSQSTDFIFSILAEEFGFLGVSTILILFFFLFFKFLIIMNKSQDRYMALVISGILGLLFFHTSFNVGMSLGVLPITGIPFPFLSYGGSSTITFFLAMSFYFNIESIVAMD

SEQ ID NO: 34 - protein, 435 aa, Borrelia burgdorferi
RKNYDYLALISLLIVSFVGILLIYSSDYNISGSLTKNEYIKQTFWVIIGFFLIFIVGKYDLKFVYSMVYPLYFLLILALIFTAFFGMTVNGARSWIGIWKLGGQPSEFGKVVIILTLSKFYTEKKGYNEFFTFITAFLLIFPSVILILLQPDFGTAIVYLTIFIFISFFAGIDLHYVLAFALIGFFSFVFAILPVWYEYKVNMGNVFYLIFSNPFYFRVIMGVLLLILLISVLGFFISKYGLSIKIIYFYVFFASSILLVSIVFSKVLSKLMKTYQIKRFLVFLDPAIDAKGAGWNLNQVKIAIGSGGLLGKGFLKGPYTHANYVPSQSTDFIFSILAEEFGFLGVSTILILFFFLFFKFLIIMNKSQDRYMALVISGILGLLFFHTSFNVGMSLGVLPITGIPFPFLSYGGSSTITFFLAMSFYFNIESIVAMD

SEQ ID NO: 35 - DNA, 1365 bp, Borrelia burgdorferi
atgaagatattcttaaaggttataggccgtggtatattaggtagattaatggtttttagaaaaaattatgattatttggctttgataagcttacttatagtttcttttgttggtatattgttgatttattctagcgattataatattagtggatctttaaccaagaatgaatatataaaacaaaccttttgggtaattattggattttttctaatttttatagtgggcaaatatgatttaaaatttgtttatagcatggtatatcctttatattttttattaatattggctttaatttttactgcattttttggaatgacagtaaatggagcaagatcttggattggcatatggaaacttggaggacagccttctgaatttggtaaagttgttattattttaaccctttcaaaattttacactgaaaaaaagggttataatgaattttttacctttattactgcatttttattaatttttccatcggtaattcttatattattgcaacctgattttggtacagcaatagtatatttaaccatttttatatttatttctttttttgcaggaatagatttgcactatgttttagcatttgcgttgatagggtttttttcttttgtttttgcaattttaccggtttggtatgaatataaggtgaatatgggtaatgtattttatcttattttctcaaatcctttttattttagagtaataatgggagtgctgcttttaattcttttgatttctgttttaggatttttcatttctaaatatggtttgagtattaaaataatttatttttatgtattttttgcaagttctattttattagtttcaatagtgttttcaaaggttctttcaaagttaatgaagacttatcagattaaacggtttttggtattcttagatccggctattgatgctaagggtgctggttggaatttaaatcaggttaaaatagcaattggttctggcggtcttttgggcaaaggatttttaaagggaccttatacccacgctaattatgtgccatctcaaagcacagattttattttttctattcttgccgaagagtttgggtttttgggtgttagcactattttaatattattttttttccttttttttaaatttttgataataatgaataaaagtcaagatagatatatggccttagtaatatctggaattttgggacttttattttttcatacttcttttaatgttggaatgtctttaggagttcttcctattaccgggattccctttccttttctctcttatggaggttcttctactattacattttttttagcaatgtctttttattttaatattgaatcaatagttgctatggattga

SEQ ID NO: 36 - DNA, 1308 bp, Borrelia burgdorferi
agaaaaaattatgattatttggctttgataagcttacttatagtttcttttgttggtatattgttgatttattctagcgattataatattagtggatctttaaccaagaatgaatatataaaacaaaccttttgggtaattattggattttttctaatttttatagtgggcaaatatgatttaaaatttgtttatagcatggtatatcctttatattttttattaatattggctttaatttttactgcattttttggaatgacagtaaatggagcaagatcttggattggcatatggaaacttggaggacagccttctgaatttggtaaagttgttattattttaaccctttcaaaattttacactgaaaaaaagggttataatgaattttttacctttattactgcatttttattaatttttccatcggtaattcttatattattgcaacctgattttggtacagcaatagtatatttaaccatttttatatttatttctttttttgcaggaatagatttgcactatgttttagcatttgcgttgatagggtttttttcttttgtttttgcaattttaccggtttggtatgaatataaggtgaatatgggtaatgtattttatcttattttctcaaatcctttttattttagagtaataatgggagtgctgcttttaattcttttgatttctgttttaggatttttcatttctaaatatggtttgagtattaaaataatttatttttatgtattttttgcaagttctattttattagtttcaatagtgttttcaaaggttctttcaaagttaatgaagacttatcagattaaacggtttttggtattcttagatccggctattgatgctaagggtgctggttggaatttaaatcaggttaaaatagcaattggttctggcggtcttttgggcaaaggatttttaaagggaccttatacccacgctaattatgtgccatctcaaagcacagattttattttttctattcttgccgaagagtttgggtttttgggtgttagcactattttaatattattttttttccttttttttaaatttttgataataatgaataaaagtcaagatagatatatggccttagtaatatctggaattttgggacttttattttttcatacttcttttaatgttggaatgtctttaggagttcttcctattaccgggattccctttccttttctctcttatggaggttcttctactattacattttttttagcaatgtctttttattttaatattgaatcaatagttgctatggattga

SEQ ID NO: 37 - protein, 129 aa, Borrelia burgdorferi
MIVFLFFSIYLIILFKRSSNSPLYFVPDTKFETLSIRIVLSCSLLLIFFCTMLDARPSTIAVFPTPGSPISIALFLFLLKSIFVRVLISASLPTKGSNFLAFASAVKFLTYFPISKCSFSSRISSSNSL

SEQ ID NO: 38 - protein, 108 aa, Borrelia burgdorferi
PLYFVPDTKFETLSIRIVLSCSLLLIFFCTMLDARPSTIAVFPTPGSPISIALFLFLLKSIFVRVLISASLPTKGSNFLAFASAVKFLTYFPISKCSFSSRISSSNSL

SEQ ID NO: 39 - DNA, 390 bp, Borrelia burgdorferi
atgattgtgtttttgtttttttcaatatacttaattatattatttaaacgatcttcaaactcgcctctatattttgttcccgataccaagtttgaaaccttaagcattagaattgttttgtcttgtagtttgctacttatttttttttgcactatgcttgatgcaaggccttcaactattgctgtttttcccacaccaggttcgcctattagcattgcactatttttatttcttctcaagagtatatttgtaagagttttaatctctgcttctcttccaaccaaggggtctaattttttggcttttgcaagtgctgttaaatttttgacatactttccaatttcaaagtgctcattttcaagtcgtatttcttcatcaaattctttgtag

SEQ ID NO: 40 - DNA, 327 bp, Borrelia burgdorferi
cctctatattttgttcccgataccaagtttgaaaccttaagcattagaattgttttgtcttgtagtttgctacttatttttttttgcactatgcttgatgcaaggccttcaactattgctgtttttcccacaccaggttcgcctattagcattgcactatttttatttcttctcaagagtatatttgtaagagttttaatctctgcttctcttccaaccaaggggtctaattttttggcttttgcaagtgctgttaaatttttgacatactttccaatttcaaagtgctcattttcaagtcgtatttcttcatcaaattctttgtag

SEQ ID NO: 41 - protein, 107 aa, Borrelia burgdorferi
MKAFKVKNLRRFSNFIRILVIVLFLNSLLSLFVFLAGSYNIFVYNFQKFYLDLAIILSSVSFGLESTRLIFFYFLKNKKIKYYLILIFSFIIFFIALVFKIFLSGNK

SEQ ID NO: 42 - protein, 69 aa, Borrelia burgdorferi
YNIFVYNFQKFYLDLAIILSSVSFGLESTRLIFFYFLKNKKIKYYLILIFSFIIFFIALVFKIFLSGNK

SEQ ID NO: 43 - DNA, 324 bp, Borrelia burgdorferi
atgaaagcttttaaagtaaaaaatctaagacgtttttcaaattttattagaattttggttattgtattgtttttaaattctttgttaagtttgttcgtgtttttggctggttcttacaatatttttgtttacaattttcagaaattttatcttgatcttgctattattttaagctctgtttcttttggacttgaatctactagactgatatttttttattttttgaaaaataaaaaaattaagtattatttaattttaatttttagttttataattttttttattgctcttgtttttaaaatttttctttctggtaataaatag

SEQ ID NO: 44 - DNA, 210 bp, Borrelia burgdorferi
tacaatatttttgtttacaattttcagaaattttatcttgatcttgctattattttaagctctgtttcttttggacttgaatctactagactgatatttttttattttttgaaaaataaaaaaattaagtattatttaattttaatttttagttttataattttttttattgctcttgtttttaaaatttttctttctggtaataaatag

SEQ ID NO: 45 - protein, 155 aa, Borrelia burgdorferi
MKKLIIIFTLFLSQACNLSTMHKIDTKEDMKILYSEIAELRKKLNLNHLEIDDTLEKVAKEYAIKLGENRTITHTLFGTTPMQRIHKYDQSFNLTREILASGIELNRVVNAWLNSPSHKEALINTDTDKIGGYRLKTTDNIDIFVVLFGKRKYKN

SEQ ID NO: 46 - protein, 136 aa, Borrelia burgdorferi
TMHKIDTKEDMKILYSEIAELRKKLNLNHLEIDDTLEKVAKEYAIKLGENRTITHTLFGTTPMQRIHKYDQSFNLTREILASGIELNRVVNAWLNSPSHKEALINTDTDKIGGYRLKTTDNIDIFVVLFGKRKYKN

SEQ ID NO: 47 - DNA, 468 bp, Borrelia burgdorferi
atgaaaaaattgattataatttttacactgtttttatctcaagcatgcaatttaagtacaatgcataaaatagatacaaaagaagatatgaaaattctatattcagaaattgctgaattgagaaaaaaattaaatctaaaccatctagaaatagatgatacccttgaaaaagttgcaaaagaatatgccattaaactgggagaaaatagaacaataactcacaccctttttggcacaaccccaatgcaaagaatacataaatacgatcaatcctttaatttaacaagagaaatactggcatcaggaattgaacttaacagagtagttaatgcatggcttaatagtccaagccacaaagaagctcttattaatacagataccgataaaataggtggctatagattaaaaacgactgacaatatagatatatttgtagttctttttggaaaaagaaaatataagaattga

SEQ ID NO: 48 - DNA, 411 bp, Borrelia burgdorferi
acaatgcataaaatagatacaaaagaagatatgaaaattctatattcagaaattgctgaattgagaaaaaaattaaatctaaaccatctagaaatagatgatacccttgaaaaagttgcaaaagaatatgccattaaactgggagaaaatagaacaataactcacaccctttttggcacaaccccaatgcaaagaatacataaatacgatcaatcctttaatttaacaagagaaatactggcatcaggaattgaacttaacagagtagttaatgcatggcttaatagtccaagccacaaagaagctcttattaatacagataccgataaaataggtggctatagattaaaaacgactgacaatatagatatatttgtagttctttttggaaaaagaaaatataagaattga

SEQ ID NO: 49 - protein, 633 aa, Borrelia burgdorferi
MKLKARMLLLVLILIAFFISILFFAFGMLINSKLVDQQFNLMINLIESIKSSFNLYISSMEEKVRVSSMYFNSAEKFNEASKIKSKRLSFISDQSEILIQTGSNMMVTDKEGKIVFTTAVKDNSDFGKSIGDREYFTKLKESNSIVYNSFVMLADPGSIEESLLKDISKIKNKKGQIPYILIGMPLRDFETDNIFGYFMFLYSMDYIYRSFRGINFGILSSGRALAYDTTGRLLVHHVVLPGDILTDISASYSNIIKKTSEDLLQKNKEISTVYYYDPKSNKKYVGISQKVLLNLSNNKFILLMRTSEDDFYYMSRATTIILAISFVFTLLMLAIATLYLVKKLSSSLNKILEYSERLASGNFTADINFGKWDTVELYSLYEGLEQLRTNFSSVAKGVIENLDYLYENAIQIANASQNLSSGAVEQASTLEQMTANIEQISQGVSENTENAATTEKIAVNTNERTKEGHKSVVKAIEAMTVITEKIGIIDEITRQTNLLALNASIEAARVGEKGKGFEVVAAEVRKLADQSKESAREIIDIANRSLTVASRAGENFEQIVPGMEQTARLVKNISNESYKQSVQIEQFKNAIEQVSQLVQTTASSSEELSAMSEKMLESVKDLKESVDYFKIEK

SEQ ID NO: 50 - protein, 606 aa, Borrelia burgdorferi
MLINSKLVDQQFNLMINLIESIKSSFNLYISSMEEKVRVSSMYFNSAEKFNEASKIKSKRLSFISDQSEILIQTGSNMMVTDKEGKIVFTTAVKDNSDFGKSIGDREYFTKLKESNSIVYNSFVMLADPGSIEESLLKDISKIKNKKGQIPYILIGMPLRDFETDNIFGYFMFLYSMDYIYRSFRGINFGILSSGRALAYDTTGRLLVHHVVLPGDILTDISASYSNIIKKTSEDLLQKNKEISTVYYYDPKSNKKYVGISQKVLLNLSNNKFILLMRTSEDDFYYMSRATTIILAISFVFTLLMLAIATLYLVKKLSSSLNKILEYSERLASGNFTADINFGKWDTVELYSLYEGLEQLRTNFSSVAKGVIENLDYLYENAIQIANASQNLSSGAVEQASTLEQMTANIEQISQGVSENTENAATTEKIAVNTNERTKEGHKSVVKAIEAMTVITEKIGIIDEITRQTNLLALNASIEAARVGEKGKGFEVVAAEVRKLADQSKESAREIIDIANRSLTVASRAGENFEQIVPGMEQTARLVKNISNESYKQSVQIEQFKNAIEQVSQLVQTTASSSEELSAMSEKMLESVKDLKESVDYFKIEK

SEQ ID NO: 51 - DNA, 1902 bp, Borrelia burgdorferi
atgaagcttaaagctaggatgttgctacttgttcttattctgatagcattctttatatcaattttgttttttgcttttggaatgcttattaatagtaaattggtggatcaacagtttaatcttatgataaatcttattgaaagcattaaaagttcttttaatctttacatctcttcaatggaagagaaagttagggttagttccatgtatttcaactctgctgaaaaatttaatgaggctagtaaaattaaatccaaaaggttgagctttatttcagatcaatctgaaattcttattcaaaccggtagtaatatgatggttacagacaaagaaggtaaaatagtgtttactacggcggttaaggataatagtgattttggcaaatctattggggatagagaatattttacaaaacttaaggagtctaatagtattgtttacaattcctttgtcatgttggcagatcccgggtctattgaggagtctttacttaaagatatttccaagataaaaaataaaaaaggtcagattccttacatattaataggtatgccattaagagattttgaaacagataacatttttggttattttatgtttctttattcaatggattatatatataggtcttttagagggattaattttggaatactctctagcggtcgtgcgctagcttatgatactacgggtagattgttggttcatcatgtagtattgccaggtgatattttgactgatattagtgcttcttattccaatattattaagaaaacatctgaagatttgttgcaaaagaataaagaaatttcaactgtttattattatgatcctaaaagcaataagaaatatgtgggaattagtcaaaaggtgttattaaacttgtctaataataaatttattcttttaatgagaacttcagaggacgatttttattacatgtcacgagctacaactataatcttagcaattagttttgtatttacattacttatgcttgctattgcaactctttatcttgtgaaaaagttaagctcttctttgaataagatactggaatattctgagagacttgcttctggtaattttactgctgatattaattttggcaaatgggatactgtagagctttacagtttgtacgaagggcttgagcagttgagaaccaatttttcttcagttgcaaaaggagttattgaaaatctagattatctttatgaaaatgcaattcaaatagcaaatgcaagccagaatttaagttctggcgctgttgagcaggcttctactttagagcaaatgacagcaaatattgagcaaatttcacaaggtgtttctgagaatactgaaaatgcagctactactgaaaaaattgctgttaatactaatgaaaggactaaagaggggcataaatctgttgttaaggctattgaggcaatgactgtaattactgaaaaaattggaattattgatgagataacaaggcaaaccaatttgcttgctttaaatgcctcgattgaagctgcacgagtgggagaaaagggcaagggatttgaagtggtagctgctgaggttagaaagcttgcagatcaaagcaaagaatcagcaagagagattattgatattgcaaacagaagtttaactgttgcaagtcgtgctggggaaaattttgaacaaatagttcctggtatggaacaaacagccagacttgtaaaaaatatttctaatgaaagttataagcaaagtgttcaaatagagcaatttaaaaatgcaatagagcaggttagtcagttagtccaaactacagcctcaagcagtgaagagctttctgcaatgtctgaaaagatgttagagagtgtaaaagatttaaaagaatctgttgattattttaagatcgaaaagtaa

SEQ ID NO: 52 - DNA, 1821 bp, Borrelia burgdorferi
atgcttattaatagtaaattggtggatcaacagtttaatcttatgataaatcttattgaaagcattaaaagttcttttaatctttacatctcttcaatggaagagaaagttagggttagttccatgtatttcaactctgctgaaaaatttaatgaggctagtaaaattaaatccaaaaggttgagctttatttcagatcaatctgaaattcttattcaaaccggtagtaatatgatggttacagacaaagaaggtaaaatagtgtttactacggcggttaaggataatagtgattttggcaaatctattggggatagagaatattttacaaaacttaaggagtctaatagtattgtttacaattcctttgtcatgttggcagatcccgggtctattgaggagtctttacttaaagatatttccaagataaaaaataaaaaaggtcagattccttacatattaataggtatgccattaagagattttgaaacagataacatttttggttattttatgtttctttattcaatggattatatatataggtcttttagagggattaattttggaatactctctagcggtcgtgcgctagcttatgatactacgggtagattgttggttcatcatgtagtattgccaggtgatattttgactgatattagtgcttcttattccaatattattaagaaaacatctgaagatttgttgcaaaagaataaagaaatttcaactgtttattattatgatcctaaaagcaataagaaatatgtgggaattagtcaaaaggtgttattaaacttgtctaataataaatttattcttttaatgagaacttcagaggacgatttttattacatgtcacgagctacaactataatcttagcaattagttttgtatttacattacttatgcttgctattgcaactctttatcttgtgaaaaagttaagctcttctttgaataagatactggaatattctgagagacttgcttctggtaattttactgctgatattaattttggcaaatgggatactgtagagctttacagtttgtacgaagggcttgagcagttgagaaccaatttttcttcagttgcaaaaggagttattgaaaatctagattatctttatgaaaatgcaattcaaatagcaaatgcaagccagaatttaagttctggcgctgttgagcaggcttctactttagagcaaatgacagcaaatattgagcaaatttcacaaggtgtttctgagaatactgaaaatgcagctactactgaaaaaattgctgttaatactaatgaaaggactaaagaggggcataaatctgttgttaaggctattgaggcaatgactgtaattactgaaaaaattggaattattgatgagataacaaggcaaaccaatttgcttgctttaaatgcctcgattgaagctgcacgagtgggagaaaagggcaagggatttgaagtggtagctgctgaggttagaaagcttgcagatcaaagcaaagaatcagcaagagagattattgatattgcaaacagaagtttaactgttgcaagtcgtgctggggaaaattttgaacaaatagttcctggtatggaacaaacagccagacttgtaaaaaatatttctaatgaaagttataagcaaagtgttcaaatagagcaatttaaaaatgcaatagagcaggttagtcagttagtccaaactacagcctcaagcagtgaagagctttctgcaatgtctgaaaagatgttagagagtgtaaaagatttaaaagaatctgttgattattttaagatcgaaaagtaa

SEQ ID NO: 53 - protein, 229 aa, Borrelia burgdorferi
MRFIIAFLMILNQGFSNLFSLPPEDIIFESSYEVAIKKAQKLNKNVLILVGRDIKENLIKDFLNSFTNGEIIHKVSRKSVFLVIDKDNEIFNKINLQKSPTIFFVDSKNEQIKAAYVGAVLSSVQFDKDFLNYVMGAIKSTSVLKKQKDYEINTADERTFFYKTLKGDWRLKFNGKDRKLVLFDTDLKEFLVFKDINENKLYAIPKSRIGNIYFSLLGNEEWKLFGKIK

SEQ ID NO: 54 - protein, 209 aa, Borrelia burgdorferi
LPPEDIIFESSYEVAIKKAQKLNKNVLILVGRDIKENLIKDFLNSFTNGEIIHKVSRKSVFLVIDKDNEIFNKINLQKSPTIFFVDSKNEQIKAAYVGAVLSSVQFDKDFLNYVMGAIKSTSVLKKQKDYEINTADERTFFYKTLKGDWRLKFNGKDRKLVLFDTDLKEFLVFKDINENKLYAIPKSRIGNIYFSLLGNEEWKLFGKIK

SEQ ID NO: 55 - DNA, 690 bp, Borrelia burgdorferi
atgagatttataattgcatttttaatgattttaaatcaaggattttcaaatttgttttctttgcctccggaagatattatttttgagagttcttatgaggttgcaattaaaaaagctcaaaaattgaataaaaatgttttaattttggttggtagagatattaaagaaaatttaataaaagattttttaaactcttttacaaatggtgaaattattcacaaagtatctagaaaaagtgtttttttagttattgataaggataatgaaatttttaataaaattaatctacaaaaaagtccgactattttttttgttgattctaagaatgagcaaataaaggcagcttatgtgggagctgttttgagcagtgttcaatttgataaggattttttaaactatgttatgggagctataaaatcaacaagtgttttaaaaaagcaaaaagattatgaaattaatactgctgatgagagaacctttttttacaaaacattaaaaggtgattggcgattaaagtttaatggtaaagacagaaagcttgttctttttgatacagatcttaaagaatttttagtttttaaagatattaatgaaaacaagctttatgctattcctaagtctaggattggtaatatttatttttcattattgggaaatgaagaatggaagctttttggaaaaataaaataa

SEQ ID NO: 56 - DNA, 630 bp, Borrelia burgdorferi
ttgcctccggaagatattatttttgagagttcttatgaggttgcaattaaaaaagctcaaaaattgaataaaaatgttttaattttggttggtagagatattaaagaaaatttaataaaagattttttaaactcttttacaaatggtgaaattattcacaaagtatctagaaaaagtgtttttttagttattgataaggataatgaaatttttaataaaattaatctacaaaaaagtccgactattttttttgttgattctaagaatgagcaaataaaggcagcttatgtgggagctgttttgagcagtgttcaatttgataaggattttttaaactatgttatgggagctataaaatcaacaagtgttttaaaaaagcaaaaagattatgaaattaatactgctgatgagagaacctttttttacaaaacattaaaaggtgattggcgattaaagtttaatggtaaagacagaaagcttgttctttttgatacagatcttaaagaatttttagtttttaaagatattaatgaaaacaagctttatgctattcctaagtctaggattggtaatatttatttttcattattgggaaatgaagaatggaagctttttggaaaaataaaataa

SEQ ID NO: 57 - protein, 133 aa, Borrelia burgdorferi
MQDRKFSFRKYFLISVFLIFIVSGITYFYSTQMLEKSQKCVEDNLDAKVKLVDMEDFYFDLNECLNMDDFFIPRPDFLNENLNKNLVVDGLIKNKFLDENFFKDLWIKKENLFNVDIEKENEKLIDKILEISK

SEQ ID NO: 58 - protein, 103 aa, Borrelia burgdorferi
TQMLEKSQKCVEDNLDAKVKLVDMEDFYFDLNECLNMDDFFIPRPDFLNENLNKNLVVDGLIKNKFLDENFFKDLWIKKENLFNVDIEKENEKLIDKILEISK

SEQ ID NO: 59 - DNA, 402 bp, Borrelia burgdorferi
atgcaagatagaaagtttagttttagaaaatattttttaatttcagtatttttgatttttattgtttctggtattacttatttctattcaacacaaatgttggaaaaatctcaaaagtgtgttgaagacaatttagacgctaaggttaaattagttgatatggaagatttttattttgatttaaatgaatgtctaaatatggatgatttttttattccaagacctgattttttaaatgaaaatttaaataagaatttagttgttgatggattgattaaaaataaatttcttgatgagaattttttcaaggatctttggattaaaaaggaaaatttatttaacgttgatattgagaaggagaatgaaaaattaatagataagattttagaaatttccaaatga

SEQ ID NO: 60 - DNA, 312 bp, Borrelia burgdorferi
acacaaatgttggaaaaatctcaaaagtgtgttgaagacaatttagacgctaaggttaaattagttgatatggaagatttttattttgatttaaatgaatgtctaaatatggatgatttttttattccaagacctgattttttaaatgaaaatttaaataagaatttagttgttgatggattgattaaaaataaatttcttgatgagaattttttcaaggatctttggattaaaaaggaaaatttatttaacgttgatattgagaaggagaatgaaaaattaatagataagattttagaaatttccaaatga

SEQ ID NO: 61 - protein, 346 aa, Borrelia burgdorferi
MIRKYLIYISLLFIVFEVYSKPAFISQDDSYELDFSSGEVDISVNTNSKFNLSFKDESWIYIKSIENEAFIKLIGESYDNGAVFTFQTFKKEGKIKLVFTYQNVKDSSEFNKIIILKITKNFEVAIPQGVGGGSSRDNNIETGNNLELGGGSISGATSKEIIVRALNLSYINDYKGAIDLLNKYNFNDDKYILLKAEIHYKNGDYLKSYENYLKLKSKYFQSIVFDLIRLAIELNIKEEVLENARYLVEKNVDFSESIYLEIFEFLVTRGEHEFALNFSSLYFPKYINSSFSDKYSYLLGKLYESESKHKDFLKALHYYKLVIDNYPFSYYYERAKIRYLFLKRFF

SEQ ID NO: 62 - protein, 326 aa, Borrelia burgdorferi
KPAFISQDDSYELDFSSGEVDISVNTNSKFNLSFKDESWIYIKSIENEAFIKLIGESYDNGAVFTFQTFKKEGKIKLVFTYQNVKDSSEFNKIIILKITKNFEVAIPQGVGGGSSRDNNIETGNNLELGGGSISGATSKEIIVRALNLSYINDYKGAIDLLNKYNFNDDKYILLKAEIHYKNGDYLKSYENYLKLKSKYFQSIVFDLIRLAIELNIKEEVLENARYLVEKNVDFSESIYLEIFEFLVTRGEHEFALNFSSLYFPKYINSSFSDKYSYLLGKLYESESKHKDFLKALHYYKLVIDNYPFSYYYERAKIRYLFLKRFF

SEQ ID NO: 63 - DNA, 1041 bp, Borrelia burgdorferi
atgattagaaaatatttgatttatataagtttgctatttattgtttttgaagtttactctaagccagcttttataagtcaagacgattcgtatgagcttgattttagtagtggagaggtagatattagtgtaaataccaattcaaaatttaatctttcttttaaagatgagtcttggatttatatcaaaagcattgaaaatgaagcttttattaagttaattggagaatcttatgataacggtgctgtttttacttttcagacttttaaaaaagaaggcaaaattaaattggttttcacttatcaaaatgttaaagattcaagtgaatttaataaaataattatcttgaaaattacaaagaattttgaagttgcaattccacaaggcgttggtggtggctctagcagggacaataacattgaaactggtaataatcttgaacttgggggggggagtattagcggggcaacttctaaagagattattgttagggctttaaatttgtcctacataaatgattacaaaggagcaatagatttgcttaataagtataatttcaatgacgataaatatattttattgaaggcggaaattcattataaaaatggtgattatttaaaatcttatgaaaattatttgaaattgaagagtaaatattttcaaagcattgtttttgatctaattaggcttgctatagaattaaatattaaagaagaggttttagagaacgctagatatttagttgaaaagaatgttgatttttctgagagcatttatcttgagatctttgaattcttagtaacaaggggagagcatgagtttgctttaaattttagctctctttactttcctaagtatattaattcaagcttttcagacaaatatagttatttgttgggaaaactttatgagtctgagagcaagcataaagattttttaaaggctttgcattactataaattggttattgataattacccttttagttattattatgagagagccaagataagatatttatttttaaagcggtttttttag

SEQ ID NO: 64 - DNA, 981 bp, Borrelia burgdorferi
aagccagcttttataagtcaagacgattcgtatgagcttgattttagtagtggagaggtagatattagtgtaaataccaattcaaaatttaatctttcttttaaagatgagtcttggatttatatcaaaagcattgaaaatgaagcttttattaagttaattggagaatcttatgataacggtgctgtttttacttttcagacttttaaaaaagaaggcaaaattaaattggttttcacttatcaaaatgttaaagattcaagtgaatttaataaaataattatcttgaaaattacaaagaattttgaagttgcaattccacaaggcgttggtggtggctctagcagggacaataacattgaaactggtaataatcttgaacttgggggggggagtattagcggggcaacttctaaagagattattgttagggctttaaatttgtcctacataaatgattacaaaggagcaatagatttgcttaataagtataatttcaatgacgataaatatattttattgaaggcggaaattcattataaaaatggtgattatttaaaatcttatgaaaattatttgaaattgaagagtaaatattttcaaagcattgtttttgatctaattaggcttgctatagaattaaatattaaagaagaggttttagagaacgctagatatttagttgaaaagaatgttgatttttctgagagcatttatcttgagatctttgaattcttagtaacaaggggagagcatgagtttgctttaaattttagctctctttactttcctaagtatattaattcaagcttttcagacaaatatagttatttgttgggaaaactttatgagtctgagagcaagcataaagattttttaaaggctttgcattactataaattggttattgataattacccttttagttattattatgagagagccaagataagatatttatttttaaagcggtttttttag

SEQ ID NO: 65 - protein, 505 aa, Borrelia burgdorferi
MTKVLVVSAIALLSKDKELIPFYKFLFLFFFFTLLACSKVSKDFIVFNKDVKTSSRIDNPNSNVLEVNKMEDFFGDIIDLKGYKILSVQQENLNLDVYFEQVVLAQNFSNLNAYLFIIGFDPKIKAGTILFKTQIDIDPKNSYNMYLEDITGDYDFNIVIQGFLKDKSVLYVFQKSVLNDVSSYRPIFFDKVNGTVLINKYARSSAYEENRSRESYPISLEKYEKVGEDLIISKIEKYEYSNVQGRYCLSSVSEKVGKIDNNIYKTLKNLSKDEVYKFLHGVWYDVHDYNKMHVKDIDEVLFLSFERQSSEINLFRKNSQEVAKIEYISKPAYNTLNVSAKSLFSDLIVYNFWIKIVDKENIEIKIDTSTNSYDNSGFSGTFKRFDENVLNVKKGSSDIYFIPSGNYVYKDKIYDFSYPHLTYIDENKIYYGIFNIFPLKNNFVLEYEIDMGSYKLVESFFLEHSERIVQKQKFSTIILNPIKILKDDVSLVKGQKLKLERIEKI

SEQ ID NO: 66 - protein, 491 aa, Borrelia burgdorferi
KDKELIPFYKFLFLFFFFTLLACSKVSKDFIVFNKDVKTSSRIDNPNSNVLEVNKMEDFFGDIIDLKGYKILSVQQENLNLDVYFEQVVLAQNFSNLNAYLFIIGFDPKIKAGTILFKTQIDIDPKNSYNMYLEDITGDYDFNIVIQGFLKDKSVLYVFQKSVLNDVSSYRPIFFDKVNGTVLINKYARSSAYEENRSRESYPISLEKYEKVGEDLIISKIEKYEYSNVQGRYCLSSVSEKVGKIDNNIYKTLKNLSKDEVYKFLHGVWYDVHDYNKMHVKDIDEVLFLSFERQSSEINLFRKNSQEVAKIEYISKPAYNTLNVSAKSLFSDLIVYNFWIKIVDKENIEIKIDTSTNSYDNSGFSGTFKRFDENVLNVKKGSSDIYFIPSGNYVYKDKIYDFSYPHLTYIDENKIYYGIFNIFPLKNNFVLEYEIDMGSYKLVESFFLEHSERIVQKQKFSTIILNPIKILKDDVSLVKGQKLKLERIEKI

SEQ ID NO: 67 - DNA, 1518 bp, Borrelia burgdorferi
atgacaaaggttttggttgttagtgcgattgctcttctgagtaaggataaagaattaatcccattttataaatttttgtttttattctttttttttacattacttgcttgttccaaggtaagcaaagattttattgtttttaacaaagatgtaaagacttcttccaggatcgataatccaaattccaatgttttagaagttaataaaatggaagatttttttggagatattatagatttaaaaggttataaaattctttcagttcagcaggaaaatttaaatttagatgtgtattttgagcaggtggttttagctcaaaatttttcaaatcttaatgcatatttgtttattattggttttgatcctaaaattaaagctggaacgattctttttaaaactcaaatagatattgatccaaaaaattcttataacatgtatcttgaagatattacaggtgattatgattttaatatagttattcaaggatttttaaaagataaatctgttttgtatgtttttcaaaaatctgttttaaatgatgtgtcttcttataggcctatattttttgacaaagttaatggaactgttcttattaataagtatgcaagatcttcagcttatgaagaaaacagatcaagagaaagctatcctatttctttagaaaaatatgaaaaagtgggggaagatttaataattagcaagattgaaaaatatgaatattctaatgttcagggtagatattgtctttcttctgtgagcgaaaaagttggtaaaattgataataatatttataaaactttaaagaatttaagcaaagatgaagtttataaatttttgcatggagtttggtatgatgttcatgactataataaaatgcatgtcaaagatattgatgaagttttattcttgtcttttgaaaggcaatcaagcgagattaatcttttcaggaaaaattctcaagaagttgcaaagattgaatatatttcaaaacctgcttacaatactcttaatgttagtgcaaagtctcttttttcagatttgatagtttataacttttggatcaaaattgtagataaagaaaacattgaaatcaaaattgacactagcacaaattcttatgataatagtggattttcgggtacatttaagaggtttgatgagaatgtcttaaatgttaaaaaagggagtagtgatatttattttattcctagtggaaattacgtgtataaggataaaatttatgatttttcttacccccatttaacttatattgatgagaataaaatttattatggcatttttaatatttttcctttaaaaaataattttgttcttgaatatgagattgacatgggtagttacaagcttgttgaatcttttttccttgagcatagcgaaagaattgttcaaaagcaaaaattttctacaatcattttaaatcctattaaaattttaaaagatgatgtaagcttagttaaagggcaaaaattaaagcttgagcgaatagaaaaaatatga

SEQ ID NO: 68 - DNA, 1476 bp, Borrelia burgdorferi
aaggataaagaattaatcccattttataaatttttgtttttattctttttttttacattacttgcttgttccaaggtaagcaaagattttattgtttttaacaaagatgtaaagacttcttccaggatcgataatccaaattccaatgttttagaagttaataaaatggaagatttttttggagatattatagatttaaaaggttataaaattctttcagttcagcaggaaaatttaaatttagatgtgtattttgagcaggtggttttagctcaaaatttttcaaatcttaatgcatatttgtttattattggttttgatcctaaaattaaagctggaacgattctttttaaaactcaaatagatattgatccaaaaaattcttataacatgtatcttgaagatattacaggtgattatgattttaatatagttattcaaggatttttaaaagataaatctgttttgtatgtttttcaaaaatctgttttaaatgatgtgtcttcttataggcctatattttttgacaaagttaatggaactgttcttattaataagtatgcaagatcttcagcttatgaagaaaacagatcaagagaaagctatcctatttctttagaaaaatatgaaaaagtgggggaagatttaataattagcaagattgaaaaatatgaatattctaatgttcagggtagatattgtctttcttctgtgagcgaaaaagttggtaaaattgataataatatttataaaactttaaagaatttaagcaaagatgaagtttataaatttttgcatggagtttggtatgatgttcatgactataataaaatgcatgtcaaagatattgatgaagttttattcttgtcttttgaaaggcaatcaagcgagattaatcttttcaggaaaaattctcaagaagttgcaaagattgaatatatttcaaaacctgcttacaatactcttaatgttagtgcaaagtctcttttttcagatttgatagtttataacttttggatcaaaattgtagataaagaaaacattgaaatcaaaattgacactagcacaaattcttatgataatagtggattttcgggtacatttaagaggtttgatgagaatgtcttaaatgttaaaaaagggagtagtgatatttattttattcctagtggaaattacgtgtataaggataaaatttatgatttttcttacccccatttaacttatattgatgagaataaaatttattatggcatttttaatatttttcctttaaaaaataattttgttcttgaatatgagattgacatgggtagttacaagcttgttgaatcttttttccttgagcatagcgaaagaattgttcaaaagcaaaaattttctacaatcattttaaatcctattaaaattttaaaagatgatgtaagcttagttaaagggcaaaaattaaagcttgagcgaatagaaaaaatatga

SEQ ID NO: 69 - protein, 179 aa, Borrelia burgdorferi
MNKLLIFVLATFCVFSSFAQANDSKNGAFGMSAGEKLLVYETSKQDPIVPFLLNLFLGFGIGSFAQGDILGGSLILGFDAVGIGLILAGAYLDIKALDGITKKAAFQWTWGKGVMLAGVVTMAVTRLTEIILPFTFANSYNRKLKNSLNVALGGFEPSFDVAMGQSSALGFELSFKKSY

SEQ ID NO: 70 - protein, 158 aa, Borrelia burgdorferi
NDSKNGAFGMSAGEKLLVYETSKQDPIVPFLLNLFLGFGIGSFAQGDILGGSLILGFDAVGIGLILAGAYLDIKALDGITKKAAFQWTWGKGVMLAGVVTMAVTRLTEIILPFTFANSYNRKLKNSLNVALGGFEPSFDVAMGQSSALGFELSFKKSY

SEQ ID NO: 71 - DNA, 540 bp, Borrelia burgdorferi
atgaataaacttttaatttttgttttggcaaccttttgtgttttttctagctttgctcaagctaatgattctaaaaatggtgcgtttgggatgagtgctggagaaaaacttttggtttatgaaactagcaagcaagatcctattgtaccatttttattgaacctttttttagggtttggaataggctcctttgctcaaggagatattcttggaggttctcttattcttggatttgatgcggttggtatagggcttatacttgcgggggcttatttggatatcaaagcgcttgatggtattactaaaaaagctgcttttcaatggacttggggtaagggagttatgttagcaggtgtggttactatggctgtgacaagattaacagaaattattcttccatttacatttgctaatagttataataggaagctaaaaaatagccttaatgtagctttaggaggatttgaacctagttttgatgttgcaatgggccaatccagtgctcttgggtttgaactgtctttcaaaaaaagctattaa

SEQ ID NO: 72 - DNA, 477 bp, Borrelia burgdorferi
aatgattctaaaaatggtgcgtttgggatgagtgctggagaaaaacttttggtttatgaaactagcaagcaagatcctattgtaccatttttattgaacctttttttagggtttggaataggctcctttgctcaaggagatattcttggaggttctcttattcttggatttgatgcggttggtatagggcttatacttgcgggggcttatttggatatcaaagcgcttgatggtattactaaaaaagctgcttttcaatggacttggggtaagggagttatgttagcaggtgtggttactatggctgtgacaagattaacagaaattattcttccatttacatttgctaatagttataataggaagctaaaaaatagccttaatgtagctttaggaggatttgaacctagttttgatgttgcaatgggccaatccagtgctcttgggtttgaactgtctttcaaaaaaagctattaa

SEQ ID NO: 73 - protein, 212 aa, Borrelia burgdorferi
MRKYIFIILIAVLLIGVNIKKIAAAANIDRHTNSTLGIDLSVGIPIFYNDLSKAYPTNLYPGGIGAIKYQYHILNNLAIGLELRYMFNFDINHSFNILNPDSSVGKIFYSVPITFSINYIFDIGELFQIPVFTNIGFSLNTYGDRNNNITNLRTFDALPTISFGSGILWNFNYKWAFGATASWWMMFEFGNSAKMAHFALVSLSVTVNVNKL

SEQ ID NO: 74 - protein, 187 aa, Borrelia burgdorferi
ANIDRHTNSTLGIDLSVGIPIFYNDLSKAYPTNLYPGGIGAIKYQYHILNNLAIGLELRYMFNFDINHSFNILNPDSSVGKIFYSVPITFSINYIFDIGELFQIPVFTNIGFSLNTYGDRNNNITNLRTFDALPTISFGSGILWNFNYKWAFGATASWWMMFEFGNSAKMAHFALVSLSVTVNVNKL

SEQ ID NO: 75 - DNA, 639 bp, Borrelia burgdorferi
atgagaaagtatatttttataatactaattgcagtcttgctaattggtgtaaacataaaaaaaattgcggccgcagccaatattgataggcatacaaactccactttaggaatagatttaagtgtaggaatccctattttttacaacgacttatcaaaagcttatcctaccaatttatatccaggaggtattggggcaataaaataccagtaccatattttaaacaatttagcaattggacttgaactaaggtatatgtttaactttgatattaaccattcttttaatatattaaatccagattcaagtgtaggtaaaattttttatagcgtgcctattacattttcaataaattatatatttgatataggagaattatttcaaattccagtcttcacaaatatagggttttctcttaatacatatggagatagaaacaacaatattacaaatttaagaacttttgatgcactccctacaatctcttttggatctggaattttatggaactttaactataaatgggcttttggagcaacagcatcttggtggatgatgtttgaatttggaaattctgctaaaatggcacattttgcacttgtatcattatcagttacagtgaatgtaaataaattgtag

SEQ ID NO: 76 - DNA, 564 bp, Borrelia burgdorferi
gccaatattgataggcatacaaactccactttaggaatagatttaagtgtaggaatccctattttttacaacgacttatcaaaagcttatcctaccaatttatatccaggaggtattggggcaataaaataccagtaccatattttaaacaatttagcaattggacttgaactaaggtatatgtttaactttgatattaaccattcttttaatatattaaatccagattcaagtgtaggtaaaattttttatagcgtgcctattacattttcaataaattatatatttgatataggagaattatttcaaattccagtcttcacaaatatagggttttctcttaatacatatggagatagaaacaacaatattacaaatttaagaacttttgatgcactccctacaatctcttttggatctggaattttatggaactttaactataaatgggcttttggagcaacagcatcttggtggatgatgtttgaatttggaaattctgctaaaatggcacattttgcacttgtatcattatcagttacagtgaatgtaaataaattgtag

SEQ ID NO: 77 - protein, 379 aa, Borrelia burgdorferi
MKNQFLNSYFQLITTIFLISSITIAAEEITSTLKVPNGFKVEIFLNNTIEKPRGITSDQDGNIFIGSGSTFAYFVTKNRKIYTIAKTLQKPIGIDYWDNKLYISSVDKIYVVKNVKEEINKSIKSHKDYTWKMQIFALLPKNNSQMHSGRYIKVDSKNNKLIVNIGSQHNVKIPPKKEAVILSINLKTKKEEIVAFGVRNSVGFDFHPISNEIYFSDNGQDGLGDNIPPDEINVITEYKEHFGFPYVFGKNQKNYGFYNKAPKNTKFIPSIYELPAHVAPLGIHFYRGNNFPKEYINKLFIAEHGSWNRSSPVGYKITTLDIDSKTRTARNYKTFLYGFLKHDKSKFGRPVDIITYYDGSILFTDDFGNKIYRVYYEKI

SEQ ID NO: 78 - protein, 352 aa, Borrelia burgdorferi
EITSTLKVPNGFKVEIFLNNTIEKPRGITSDQDGNIFIGSGSTFAYFVTKNRKIYTIAKTLQKPIGIDYWDNKLYISSVDKIYVVKNVKEEINKSIKSHKDYTWKMQIFALLPKNNSQMHSGRYIKVDSKNNKLIVNIGSQHNVKIPPKKEAVILSINLKTKKEEIVAFGVRNSVGFDFHPISNEIYFSDNGQDGLGDNIPPDEINVITEYKEHFGFPYVFGKNQKNYGFYNKAPKNTKFIPSIYELPAHVAPLGIHFYRGNNFPKEYINKLFIAEHGSWNRSSPVGYKITTLDIDSKTRTARNYKTFLYGFLKHDKSKFGRPVDIITYYDGSILFTDDFGNKIYRVYYEKI

SEQ ID NO: 79 - DNA, 1140 bp, Borrelia burgdorferi
atgaaaaatcaatttttaaatagctattttcaattaattacaactattttcttaatctcatctataactattgcagcagaagaaataacaagcacactaaaagttcctaatggatttaaagtcgaaatttttttaaacaatacaattgaaaaacctagaggaatcacaagcgatcaagatggaaatatattcataggatctggaagcacttttgcatactttgtaacaaaaaacagaaaaatttataccatagcaaaaaccctgcaaaaacctattggtattgattattgggataataaactctacatatcttctgtcgataaaatatatgtagttaaaaatgtaaaagaagaaattaataaaagcataaaatcacataaagactatacatggaaaatgcaaatttttgcacttttgccaaaaaataattctcaaatgcactcaggacgttacattaaagtagattctaaaaataacaaattaatagtaaatataggatcccagcacaatgttaaaattcccccaaaaaaagaagcagtaatccttagtattaatttaaaaacaaaaaaagaagaaatagtagcttttggagtgagaaactcagttgggtttgattttcacccaattagcaatgaaatatattttagcgacaatggccaagacggattaggagacaacattcccccagatgaaataaacgtaataaccgaatataaagaacattttggatttccctatgtgtttggaaaaaatcaaaaaaattacggtttttataacaaagcacccaaaaacactaagtttatcccatctatttacgaacttcccgcacatgtagctccacttggaatacacttttaccggggaaataactttccaaaagaatacataaataaattattcatagcagaacacggctcgtggaacagatcttctcctgttggctacaaaataacaacactagacattgattctaaaaccagaacagcaagaaattacaagacttttttatatggatttttaaagcacgacaaatctaaatttggacgccctgttgatataatcacatattatgacggttcaattctttttacagatgactttggaaataaaatatacagagtttactacgaaaagatttaa

SEQ ID NO: 80 - DNA, 1059 bp, Borrelia burgdorferi
gaaataacaagcacactaaaagttcctaatggatttaaagtcgaaatttttttaaacaatacaattgaaaaacctagaggaatcacaagcgatcaagatggaaatatattcataggatctggaagcacttttgcatactttgtaacaaaaaacagaaaaatttataccatagcaaaaaccctgcaaaaacctattggtattgattattgggataataaactctacatatcttctgtcgataaaatatatgtagttaaaaatgtaaaagaagaaattaataaaagcataaaatcacataaagactatacatggaaaatgcaaatttttgcacttttgccaaaaaataattctcaaatgcactcaggacgttacattaaagtagattctaaaaataacaaattaatagtaaatataggatcccagcacaatgttaaaattcccccaaaaaaagaagcagtaatccttagtattaatttaaaaacaaaaaaagaagaaatagtagcttttggagtgagaaactcagttgggtttgattttcacccaattagcaatgaaatatattttagcgacaatggccaagacggattaggagacaacattcccccagatgaaataaacgtaataaccgaatataaagaacattttggatttccctatgtgtttggaaaaaatcaaaaaaattacggtttttataacaaagcacccaaaaacactaagtttatcccatctatttacgaacttcccgcacatgtagctccacttggaatacacttttaccggggaaataactttccaaaagaatacataaataaattattcatagcagaacacggctcgtggaacagatcttctcctgttggctacaaaataacaacactagacattgattctaaaaccagaacagcaagaaattacaagacttttttatatggatttttaaagcacgacaaatctaaatttggacgccctgttgatataatcacatattatgacggttcaattctttttacagatgactttggaaataaaatatacagagtttactacgaaaagatttaa

SEQ ID NO: 81 - protein, 123 aa, Borrelia burgdorferi
MNYARFAVLIVLLFFYIWFFIILRMKRTNLFLLEKIQNGAKILDIRSPKEYSKSHYLKSINIPFNNLFAKKDKLGDFESPIIVYGKSFNKSYEAKKVLKSMGFKNVFVAGTLKDMPQAKKEVG

SEQ ID NO: 82 - protein, 100 aa, Borrelia burgdorferi
RMKRTNLFLLEKIQNGAKILDIRSPKEYSKSHYLKSINIPFNNLFAKKDKLGDFESPIIVYGKSFNKSYEAKKVLKSMGFKNVFVAGTLKDMPQAKKEVG

SEQ ID NO: 83 - DNA, 372 bp, Borrelia burgdorferi
atgaattatgcaagatttgcagtattaatagttctgctttttttttatatttggttttttattatccttaggatgaaaagaactaatctgtttttgttagaaaaaatccaaaatggagcaaaaattttggatattcggtctcccaaagaatatagcaagtctcattatttgaagtcaattaacattccttttaataatttatttgctaaaaaggataaattaggtgattttgagtccccaataattgtttatggtaaaagttttaataagtcttacgaggctaaaaaagttttaaaaagcatgggatttaagaatgtgtttgttgctggaaccttgaaagacatgccacaagcaaaaaaagaagttggttga

SEQ ID NO: 84 - DNA, 303 bp, Borrelia burgdorferi
aggatgaaaagaactaatctgtttttgttagaaaaaatccaaaatggagcaaaaattttggatattcggtctcccaaagaatatagcaagtctcattatttgaagtcaattaacattccttttaataatttatttgctaaaaaggataaattaggtgattttgagtccccaataattgtttatggtaaaagttttaataagtcttacgaggctaaaaaagttttaaaaagcatgggatttaagaatgtgtttgttgctggaaccttgaaagacatgccacaagcaaaaaaagaagttggttga

SEQ ID NO: 85 - protein, 204 aa, Borrelia burgdorferi
MIKKFLLFAMLNIFLTNKAHSNEEIIEISTEIQKEKYIPFLISRGKTQLEDLVKYTLEINPELDKNYVNTVAKTYIDESLIEGVNYDIAYAQMLLETGALKFNGIVSKEQHNFSGIGATNNLTKGNSFSNITEGIKAHIQHLKAYASKQNIKSNMVDPRFYLVKRGSAPTIYDLTGKWAKDKLYDKKLKKILLELLEYNNANKS

SEQ ID NO: 86 - protein, 183 aa, Borrelia burgdorferi
NEEIIEISTEIQKEKYIPFLISRGKTQLEDLVKYTLEINPELDKNYVNTVAKTYIDESLIEGVNYDIAYAQMLLETGALKFNGIVSKEQHNFSGIGATNNLTKGNSFSNITEGIKAHIQHLKAYASKQNIKSNMVDPRFYLVKRGSAPTIYDLTGKWAKDKLYDKKLKKILLELLEYNNANKS

SEQ ID NO: 87 - DNA, 615 bp, Borrelia burgdorferi
atgataaaaaaattcttgctatttgcaatgctcaacatctttttaacaaataaagctcatagtaatgaagagataatcgaaataagtactgaaatacaaaaggaaaaatatattccctttttaataagtagaggaaaaactcaactagaagaccttgtaaaatatactctagaaataaatccagagcttgacaaaaactatgtaaatactgttgctaaaacctatatagacgaatctttgattgaaggggttaattatgacattgcctatgctcaaatgttactagaaacaggagctctaaaattcaatggaatagtttcaaaagaacaacacaatttttcaggaataggcgctactaataatcttacaaaaggaaattctttttccaatattacagaaggaattaaagctcatattcaacatttaaaagcttatgcttcaaaacaaaatatcaaatcaaatatggttgatcctagattttaccttgttaaaagaggatctgctccaacaatatatgatttgactgggaaatgggcaaaagacaaactttacgacaaaaaacttaaaaaaatattattagaactattagaatataataatgcaaataaaagctaa

SEQ ID NO: 88 - DNA, 552 bp, Borrelia burgdorferi
aatgaagagataatcgaaataagtactgaaatacaaaaggaaaaatatattccctttttaataagtagaggaaaaactcaactagaagaccttgtaaaatatactctagaaataaatccagagcttgacaaaaactatgtaaatactgttgctaaaacctatatagacgaatctttgattgaaggggttaattatgacattgcctatgctcaaatgttactagaaacaggagctctaaaattcaatggaatagtttcaaaagaacaacacaatttttcaggaataggcgctactaataatcttacaaaaggaaattctttttccaatattacagaaggaattaaagctcatattcaacatttaaaagcttatgcttcaaaacaaaatatcaaatcaaatatggttgatcctagattttaccttgttaaaagaggatctgctccaacaatatatgatttgactgggaaatgggcaaaagacaaactttacgacaaaaaacttaaaaaaatattattagaactattagaatataataatgcaaataaaagctaa

SEQ ID NO: 89 - protein, 482 aa, Borrelia burgdorferi
MKLFRRNVMIKMPSSFTIIFSLIVFVTILTYVIPAGKFDKEFKQMGDGSKREIIVAGTYQYVDRGSRGFLHPIMTILTAMSKGMEHAVEVIVFVLIVGGAYGIIMKTGAIDVGIYFLIKKLGHKDKLLIPLLMFIFSIGGTVTGMSEETLPFYFVMIPLIVALGYDSLVGAAIIALGAGVGTMASTVNPFATGIASAIASISLQDGFYFRIVLYFVSVLAAITYVCVYASKIKKDPSKSLVYSQKDEHYQYFVKKDGLSTGDNAQNALEFTFAHKLVLLLFGFMILILIFSIVNLGWWMQEMTMLYLGVAIISAFICKLGETEMWDAFVKGSESLLTAALVIGLARGVMIVCDDGLITDTMLNAATNFLYNLPRPLFIILNEIIQIFIGFVVPSSSGHASLTMPIMAPLADFLSIPRASVVIAMQTASGLINLITPTSGVIMAVLGISRLSYGTWFKFVLPLFMIEFFISILVIIANIYLSF

SEQ ID NO: 90 - protein, 446 aa, Borrelia burgdorferi
KFDKEFKQMGDGSKREIIVAGTYQYVDRGSRGFLHPIMTILTAMSKGMEHAVEVIVFVLIVGGAYGIIMKTGAIDVGIYFLIKKLGHKDKLLIPLLMFIFSIGGTVTGMSEETLPFYFVMIPLIVALGYDSLVGAAIIALGAGVGTMASTVNPFATGIASAIASISLQDGFYFRIVLYFVSVLAAITYVCVYASKIKKDPSKSLVYSQKDEHYQYFVKKDGLSTGDNAQNALEFTFAHKLVLLLFGFMILILIFSIVNLGWWMQEMTMLYLGVAIISAFICKLGETEMWDAFVKGSESLLTAALVIGLARGVMIVCDDGLITDTMLNAATNFLYNLPRPLFIILNEIIQIFIGFVVPSSSGHASLTMPIMAPLADFLSIPRASVVIAMQTASGLINLITPTSGVIMAVLGISRLSYGTWFKFVLPLFMIEFFISILVIIANIYLSF

SEQ ID NO: 91 - DNA, 1449 bp, Borrelia burgdorferi
atgaaattatttaggagaaacgttatgatcaaaatgccaagtagttttacaataatattttctttaattgtatttgttaccattttaacgtatgtgattcctgccggtaagtttgataaagaatttaagcaaatgggtgatggatctaaaagggaaataattgttgctggaacttatcaatatgtagatcgaggctctaggggatttttacatcctattatgactattttaaccgcaatgtcaaaggggatggaacatgcagttgaagttattgtttttgttttaattgttgggggtgcttatgggattattatgaaaactggagcaatagatgtgggaatttattttttaatcaagaagttggggcacaaagataagttgcttattcctttgttaatgtttattttttcaattggtggaactgtaaccggaatgagtgaagagacccttcctttttattttgttatgattcccttgatagtagctttgggttatgatagtcttgttggagcggctattattgctttaggagctggagtgggaactatggcttctactgtaaatccatttgcgacaggaattgcatctgcaatagcttctattagcttgcaggatggattttattttagaattgttctttattttgtatcagtattggctgctataacctatgtttgtgtttatgcgtctaaaattaaaaaggatccctcaaaatcgcttgtgtattctcaaaaagatgaacattatcaatattttgttaaaaaagatggactttctaccggagataatgctcagaatgctcttgagtttacttttgctcataaattagttttacttttatttggatttatgatattgattttgatatttagcattgttaatcttggttggtggatgcaagaaatgacaatgttgtatcttggagttgctattatatcggcttttatttgtaaattaggtgaaactgaaatgtgggatgcgtttgtgaaaggttctgaaagtctgctaaccgctgctcttgttattggacttgctagaggtgttatgatagtatgtgatgatgggttgattacagatactatgttaaatgctgctactaattttttatacaatcttccaagacccctttttatcatattgaatgaaattattcaaatatttataggatttgttgttccatcttcatcaggacatgctagtctcactatgccaataatggctcctcttgccgattttttgtcaattccaagagcttcagttgttattgccatgcagactgcatctgggcttattaatttgataacacctaccagcggagttataatggctgtattggggatatccagattgagttatggtacgtggtttaagtttgttttaccattatttatgattgagttttttatctctattttagttattatagctaacatttatttaagtttttag

SEQ ID NO: 92 - DNA, 1341 bp, Borrelia burgdorferi
aagtttgataaagaatttaagcaaatgggtgatggatctaaaagggaaataattgttgctggaacttatcaatatgtagatcgaggctctaggggatttttacatcctattatgactattttaaccgcaatgtcaaaggggatggaacatgcagttgaagttattgtttttgttttaattgttgggggtgcttatgggattattatgaaaactggagcaatagatgtgggaatttattttttaatcaagaagttggggcacaaagataagttgcttattcctttgttaatgtttattttttcaattggtggaactgtaaccggaatgagtgaagagacccttcctttttattttgttatgattcccttgatagtagctttgggttatgatagtcttgttggagcggctattattgctttaggagctggagtgggaactatggcttctactgtaaatccatttgcgacaggaattgcatctgcaatagcttctattagcttgcaggatggattttattttagaattgttctttattttgtatcagtattggctgctataacctatgtttgtgtttatgcgtctaaaattaaaaaggatccctcaaaatcgcttgtgtattctcaaaaagatgaacattatcaatattttgttaaaaaagatggactttctaccggagataatgctcagaatgctcttgagtttacttttgctcataaattagttttacttttatttggatttatgatattgattttgatatttagcattgttaatcttggttggtggatgcaagaaatgacaatgttgtatcttggagttgctattatatcggcttttatttgtaaattaggtgaaactgaaatgtgggatgcgtttgtgaaaggttctgaaagtctgctaaccgctgctcttgttattggacttgctagaggtgttatgatagtatgtgatgatgggttgattacagatactatgttaaatgctgctactaattttttatacaatcttccaagacccctttttatcatattgaatgaaattattcaaatatttataggatttgttgttccatcttcatcaggacatgctagtctcactatgccaataatggctcctcttgccgattttttgtcaattccaagagcttcagttgttattgccatgcagactgcatctgggcttattaatttgataacacctaccagcggagttataatggctgtattggggatatccagattgagttatggtacgtggtttaagtttgttttaccattatttatgattgagttttttatctctattttagttattatagctaacatttatttaagtttttag

SEQ ID NO: 93 - protein, 469 aa, Borrelia burgdorferi
MKYFYFLFFLLIFNVYAQNVNSPALPSPPLLPEITENKPVERENSSKGENFSNVGLDGKYVNDTILYGLDSQVTSIIKALKKSSDSQYNFSLKKRLEKTFNAELKREILELFISLKYSGGIDTANYILENYESKRYSNALFGLAISYLKEFDDKEKLKKTLIDILENKEGNVVSIAAYYLGELNSLEYSKNMMEVFEKYSGNDGARREILIALGKMSAVDYQDRIYEISLDNYEGPSIKAAAIEALSYLASDKVTENADLYLQSNNNNLNVKLAIIASLSKDPSLKSKEILQGFLRDSDDNIRFKAINAIKGHRDSSAKDILIYKLKSDPSLKVREASAKALIDMDLGNIEIKNIMFDFKIDNNFKISMFSYLLDKDSLKALSIALEIVNKENINRPSNVLRGVASMLAGKKGNFDNFYSKIIDSKNIDLRHLALKGAVYNKSSSLSDKLKKIKSETNSEYIKMLLKDY

SEQ ID NO: 94 - protein, 445 aa, Borrelia burgdorferi
LPSPPLLPEITENKPVERENSSKGENFSNVGLDGKYVNDTILYGLDSQVTSIIKALKKSSDSQYNFSLKKRLEKTFNAELKREILELFISLKYSGGIDTANYILENYESKRYSNALFGLAISYLKEFDDKEKLKKTLIDILENKEGNVVSIAAYYLGELNSLEYSKNMMEVFEKYSGNDGARREILIALGKMSAVDYQDRIYEISLDNYEGPSIKAAAIEALSYLASDKVTENADLYLQSNNNNLNVKLAIIASLSKDPSLKSKEILQGFLRDSDDNIRFKAINAIKGHRDSSAKDILIYKLKSDPSLKVREASAKALIDMDLGNIEIKNIMFDFKIDNNFKISMFSYLLDKDSLKALSIALEIVNKENINRPSNVLRGVASMLAGKKGNFDNFYSKIIDSKNIDLRHLALKGAVYNKSSSLSDKLKKIKSETNSEYIKMLLKDY

SEQ ID NO: 95 - DNA, 1410 bp, Borrelia burgdorferi
atgaaatacttttattttttattttttttacttatttttaatgtgtatgctcaaaatgttaattctccagctcttcctagtccgcctttgttgcccgaaattacagaaaataagcctgttgagagagaaaattcttctaagggagagaatttttctaatgttggtttagatggtaagtatgttaacgatacaattctttatgggcttgatagtcaagtgacaagcattataaaagctcttaaaaaatcaagcgatagtcaatataatttttctcttaaaaaaagacttgagaaaacttttaatgctgagcttaaaagggaaatacttgaattgtttatttctcttaagtattcggggggcattgatacagcaaattatattcttgaaaattatgagagtaaaagatattcaaacgctttatttggcttggcaatttcgtatcttaaggagtttgatgataaagaaaaattaaaaaaaactcttattgacattcttgaaaataaagagggcaatgtggtatctattgcagcttattatttaggagagcttaattctcttgagtattctaaaaacatgatggaagtttttgaaaaatattctggaaatgatggggctagaagagaaatacttattgctcttggaaaaatgtccgctgttgattatcaggatagaatttatgaaatttcgctagataattacgagggcccatcaattaaggctgctgcaatcgaagcgttgtcatatcttgcttcagataaagtaactgaaaatgctgatttgtatcttcagagtaataacaataatttaaatgttaaattagctattattgcttctttgtccaaagatccttctttaaagtctaaagagattttacaaggatttttaagagattctgatgataatattaggtttaaagctattaatgcaatcaaaggacatagggactcttctgcaaaggatattttgatttataagcttaaaagcgatccatctcttaaagttagggaggcttctgctaaggccttaattgatatggatcttgggaatattgagataaaaaacattatgtttgattttaagattgacaataattttaaaatttcaatgtttagttaccttttagataaggattctctaaaagcattgtcaattgctttagaaattgttaataaagaaaatattaatagaccctcaaatgttttaaggggcgttgcttcaatgttggctggtaaaaagggtaattttgataatttttattctaaaatcattgacagcaaaaatattgatttaaggcatttagcattaaaaggagctgtttataataaatcttcatcgctttctgataagcttaaaaaaattaaaagtgaaacgaactccgaatatattaaaatgcttttaaaagattattga

SEQ ID NO: 96 - DNA, 1338 bp, Borrelia burgdorferi
cttcctagtccgcctttgttgcccgaaattacagaaaataagcctgttgagagagaaaattcttctaagggagagaatttttctaatgttggtttagatggtaagtatgttaacgatacaattctttatgggcttgatagtcaagtgacaagcattataaaagctcttaaaaaatcaagcgatagtcaatataatttttctcttaaaaaaagacttgagaaaacttttaatgctgagcttaaaagggaaatacttgaattgtttatttctcttaagtattcggggggcattgatacagcaaattatattcttgaaaattatgagagtaaaagatattcaaacgctttatttggcttggcaatttcgtatcttaaggagtttgatgataaagaaaaattaaaaaaaactcttattgacattcttgaaaataaagagggcaatgtggtatctattgcagcttattatttaggagagcttaattctcttgagtattctaaaaacatgatggaagtttttgaaaaatattctggaaatgatggggctagaagagaaatacttattgctcttggaaaaatgtccgctgttgattatcaggatagaatttatgaaatttcgctagataattacgagggcccatcaattaaggctgctgcaatcgaagcgttgtcatatcttgcttcagataaagtaactgaaaatgctgatttgtatcttcagagtaataacaataatttaaatgttaaattagctattattgcttctttgtccaaagatccttctttaaagtctaaagagattttacaaggatttttaagagattctgatgataatattaggtttaaagctattaatgcaatcaaaggacatagggactcttctgcaaaggatattttgatttataagcttaaaagcgatccatctcttaaagttagggaggcttctgctaaggccttaattgatatggatcttgggaatattgagataaaaaacattatgtttgattttaagattgacaataattttaaaatttcaatgtttagttaccttttagataaggattctctaaaagcattgtcaattgctttagaaattgttaataaagaaaatattaatagaccctcaaatgttttaaggggcgttgcttcaatgttggctggtaaaaagggtaattttgataatttttattctaaaatcattgacagcaaaaatattgatttaaggcatttagcattaaaaggagctgtttataataaatcttcatcgctttctgataagcttaaaaaaattaaaagtgaaacgaactccgaatatattaaaatgcttttaaaagattattga

SEQ ID NO: 97 - protein, 506 aa, Borrelia burgdorferi
MKFVLNNLFKGCLICFFLFFSCLTTDRSIQDSHISDIVEKKKEAVIIDDNNVVLGSNEGKFKRDYLIGLKDNESFFLSDAFLKENNFYFKKARESYAKKNIGLTNYYLNKIVTNENQHSRELLAKANLFFGYVNYENGFYDLSEYNFDLFLKDYKYSHASLRLAELKYLVKEKSDAISAFKEINEFSISGYDREIYGFLSNKLGVSHLNLESLGFLDNSVFDTFVFNDNIFVTNILGGLLRYNIKKNDCRVYLKDKKSIFLNGIRGFADYNGTIYIGGKNVVYYIDDVDGDLKQINVPGNADFSNVQVLLAVKNGIFVGTLNSGLWFYDLKNWKNIPLGSNKISSLCFDSLKNLLLVGTVDKAIYSVNVDNLKKIEHLDFFSKNDNEKNINFIKEYKDSYFVGTYGGGLFELNLNKNSYKKHVIANNIDVNYFMDMEIKDKKLLFATFDHGLLIYDSENDNWDYFGPNNGLLNLNLIKVSRFENYVILGTINNGLVFVDENIKKQL

SEQ ID NO: 98 - protein, 485 aa, Borrelia burgdorferi
CLTTDRSIQDSHISDIVEKKKEAVIIDDNNVVLGSNEGKFKRDYLIGLKDNESFFLSDAFLKENNFYFKKARESYAKKNIGLTNYYLNKIVTNENQHSRELLAKANLFFGYVNYENGFYDLSEYNFDLFLKDYKYSHASLRLAELKYLVKEKSDAISAFKEINEFSISGYDREIYGFLSNKLGVSHLNLESLGFLDNSVFDTFVFNDNIFVTNILGGLLRYNIKKNDCRVYLKDKKSIFLNGIRGFADYNGTIYIGGKNVVYYIDDVDGDLKQINVPGNADFSNVQVLLAVKNGIFVGTLNSGLWFYDLKNWKNIPLGSNKISSLCFDSLKNLLLVGTVDKAIYSVNVDNLKKIEHLDFFSKNDNEKNINFIKEYKDSYFVGTYGGGLFELNLNKNSYKKHVIANNIDVNYFMDMEIKDKKLLFATFDHGLLIYDSENDNWDYFGPNNGLLNLNLIKVSRFENYVILGTINNGLVFVDENIKKQL

SEQ ID NO: 99 - DNA, 1521 bp, Borrelia burgdorferi
atgaaatttgttttgaataatttatttaaaggttgtcttatatgttttttcttgtttttttcctgccttactacagatagatctattcaagattctcatattagtgatattgtagagaagaaaaaagaagcagtcattattgatgataataatgttgttcttgggagtaatgagggtaaatttaaaagagactatttgataggattaaaagataatgaatctttttttcttagtgatgcttttttaaaagaaaataatttttattttaaaaaagccagggaaagttatgctaaaaaaaatattggcttgacaaattattatttgaataaaatagtaactaatgagaatcagcacagcagagaattgctagctaaagcgaatttgttttttggatatgtaaattatgagaatggtttttatgatctttccgaatataattttgatctatttttaaaagactataaatattctcatgctagtttaagattagctgaattaaaatatcttgttaaagaaaaatctgatgcaatttctgcatttaaagagattaatgaattttctatctcaggttatgatagagagatttatggctttttaagtaataaacttggagtaagtcatttaaacttagagtctttaggatttcttgacaacagcgtttttgatacatttgtctttaatgacaatatatttgtaactaatatattgggagggcttttaagatataatattaaaaaaaatgattgtagagtctatcttaaggataaaaaaagcatttttttaaatggcattaggggttttgcggattataatggaacaatttatattggtggtaaaaatgttgtttattatatagatgatgttgatggggatttaaagcaaataaatgttcccggtaatgctgattttagcaatgtacaagttttgcttgctgttaaaaatggaatatttgttggcactctaaattctggattatggttttatgatttaaaaaattggaaaaatataccgcttggatctaataaaatttcttcactctgctttgatagtttaaaaaatttattattagttggaacagttgacaaggctatttatagtgttaatgtcgataatttgaaaaagattgaacatttggatttttttagcaaaaatgataatgaaaaaaatattaattttataaaagaatataaagatagttattttgttggaacatatggtgggggtctttttgaattaaatttaaataaaaatagttacaaaaagcacgttattgccaataatattgatgttaattattttatggatatggagattaaagataaaaagctattgtttgcaacctttgatcatgggttattgatttatgattctgaaaatgacaactgggattattttggacccaataatgggcttcttaatttgaatttaataaaagtttctagatttgaaaattatgtcatactgggcactattaataacggtttggtttttgtagatgaaaatattaaaaaacagttatga

SEQ ID NO: 100 - DNA, 1458 bp, Borrelia burgdorferi
tgccttactacagatagatctattcaagattctcatattagtgatattgtagagaagaaaaaagaagcagtcattattgatgataataatgttgttcttgggagtaatgagggtaaatttaaaagagactatttgataggattaaaagataatgaatctttttttcttagtgatgcttttttaaaagaaaataatttttattttaaaaaagccagggaaagttatgctaaaaaaaatattggcttgacaaattattatttgaataaaatagtaactaatgagaatcagcacagcagagaattgctagctaaagcgaatttgttttttggatatgtaaattatgagaatggtttttatgatctttccgaatataattttgatctatttttaaaagactataaatattctcatgctagtttaagattagctgaattaaaatatcttgttaaagaaaaatctgatgcaatttctgcatttaaagagattaatgaattttctatctcaggttatgatagagagatttatggctttttaagtaataaacttggagtaagtcatttaaacttagagtctttaggatttcttgacaacagcgtttttgatacatttgtctttaatgacaatatatttgtaactaatatattgggagggcttttaagatataatattaaaaaaaatgattgtagagtctatcttaaggataaaaaaagcatttttttaaatggcattaggggttttgcggattataatggaacaatttatattggtggtaaaaatgttgtttattatatagatgatgttgatggggatttaaagcaaataaatgttcccggtaatgctgattttagcaatgtacaagttttgcttgctgttaaaaatggaatatttgttggcactctaaattctggattatggttttatgatttaaaaaattggaaaaatataccgcttggatctaataaaatttcttcactctgctttgatagtttaaaaaatttattattagttggaacagttgacaaggctatttatagtgttaatgtcgataatttgaaaaagattgaacatttggatttttttagcaaaaatgataatgaaaaaaatattaattttataaaagaatataaagatagttattttgttggaacatatggtgggggtctttttgaattaaatttaaataaaaatagttacaaaaagcacgttattgccaataatattgatgttaattattttatggatatggagattaaagataaaaagctattgtttgcaacctttgatcatgggttattgatttatgattctgaaaatgacaactgggattattttggacccaataatgggcttcttaatttgaatttaataaaagtttctagatttgaaaattatgtcatactgggcactattaataacggtttggtttttgtagatgaaaatattaaaaaacagttatga

SEQ ID NO: 101 - protein, 207 aa, Borrelia burgdorferi
MHIFKNVPFQINLILFLLVSVAKINASSKFYYAEQWYVIFNSQMKKKPENYKKNIFFLQKALKYPFGNPKYSLTKIETKEQWEKYKLLFKMHVNLLLVRQNLHLGDLFDTRNLYFFKTPEKDGIISNLEKSKKLYKLAINYYSEALKYHKKLENYTTVKLENDGITNWEDEYHKISLKELNYYDIIKKELLRIDETKAFFEQGPNYY

SEQ ID NO: 102 - protein, 185 aa, Borrelia burgdorferi
KINASSKFYYAEQWYVIFNSQMKKKPENYKKNIFFLQKALKYPFGNPKYSLTKIETKEQWEKYKLLFKMHVNLLLVRQNLHLGDLFDTRNLYFFKTPEKDGIISNLEKSKKLYKLAINYYSEALKYHKKLENYTTVKLENDGITNWEDEYHKISLKELNYYDIIKKELLRIDETKAFFEQGPNYY

SEQ ID NO: 103 - DNA, 624 bp, Borrelia burgdorferi
atgcatattttcaaaaatgtccccttccaaataaatttaattttatttcttttagtatcagttgcaaagataaatgcatcgtccaaattttattacgcagaacaatggtatgtaatttttaattctcaaatgaaaaaaaaacctgaaaactataaaaaaaatatattttttcttcaaaaagccttaaaatacccatttggaaatccaaaatattctctaactaaaatagaaaccaaagaacagtgggaaaaatataaacttcttttcaaaatgcatgtaaacttgcttctagttaggcaaaatttacatttaggagatttattcgacacaagaaatttatattttttcaaaactccagaaaaagatggaattatttccaatctagaaaaatcaaaaaaattatataaactagctattaattactacagcgaagcactaaaataccacaaaaaacttgaaaattacacaactgttaaactagaaaacgatggaataacaaactgggaagatgaatatcataaaatttctcttaaagagcttaattactatgacattattaaaaaagaactactaagaattgacgaaactaaagcattttttgaacaagggccaaactattattaa

SEQ ID NO: 104 - DNA, 558 bp, Borrelia burgdorferi
aagataaatgcatcgtccaaattttattacgcagaacaatggtatgtaatttttaattctcaaatgaaaaaaaaacctgaaaactataaaaaaaatatattttttcttcaaaaagccttaaaatacccatttggaaatccaaaatattctctaactaaaatagaaaccaaagaacagtgggaaaaatataaacttcttttcaaaatgcatgtaaacttgcttctagttaggcaaaatttacatttaggagatttattcgacacaagaaatttatattttttcaaaactccagaaaaagatggaattatttccaatctagaaaaatcaaaaaaattatataaactagctattaattactacagcgaagcactaaaataccacaaaaaacttgaaaattacacaactgttaaactagaaaacgatggaataacaaactgggaagatgaatatcataaaatttctcttaaagagcttaattactatgacattattaaaaaagaactactaagaattgacgaaactaaagcattttttgaacaagggccaaactattattaa

SEQ ID NO: 105 - protein, 538 aa, Borrelia burgdorferi
MKNINRLILLILTTHTLLFSCALIADNKSKNLSTSEIILTQKTLLESSLIKNPSNVEYRIPISSIQEILNNNNDSFLIKKTAAKIKISPQKLEEIKNYLNAYKNYLNNETEWIKFIDQSSVNGNLTIKIDTAFEKKTNFNHTNSDNENLTELIELQMHLEKEILNLIEQTFHDKNLGYIQLSHINSFFPQENINSITKEIIDGKEYIAPHIIANQLLKIKDKKYFEQFMHFLKVENSKIKTIIEKQKISDLHNELYYSKQSPPRRRKRSTADSDNNNKYDIIPKIIDPNTGIEITPKNLRSILSNGDIILIKPKIDWTEFFYFWQHVGIFDEEKYEATKKIAFNGIDSFDIKSIITSNQIKFDTASTQGSGYEKLSTYVQSRILKIFSPITDIRTIQKAINFGRSRYIDNNFGYMVPLISSNLWTDSFNLEEIHNKTYCSLMVDRIYKIAGLNVSRNYEISGIITPGEINAAAYNFYMSYTIAGILPSVLPKRLIKPTLKEKFIGYNKEIVDAIELKKSKEKIFGRACNITNLWCSGS

SEQ ID NO: 106 - protein, 518 aa, Borrelia burgdorferi
CALIADNKSKNLSTSEIILTQKTLLESSLIKNPSNVEYRIPISSIQEILNNNNDSFLIKKTAAKIKISPQKLEEIKNYLNAYKNYLNNETEWIKFIDQSSVNGNLTIKIDTAFEKKTNFNHTNSDNENLTELIELQMHLEKEILNLIEQTFHDKNLGYIQLSHINSFFPQENINSITKEIIDGKEYIAPHIIANQLLKIKDKKYFEQFMHFLKVENSKIKTIIEKQKISDLHNELYYSKQSPPRRRKRSTADSDNNNKYDIIPKIIDPNTGIEITPKNLRSILSNGDIILIKPKIDWTEFFYFWQHVGIFDEEKYEATKKIAFNGIDSFDIKSIITSNQIKFDTASTQGSGYEKLSTYVQSRILKIFSPITDIRTIQKAINFGRSRYIDNNFGYMVPLISSNLWTDSFNLEEIHNKTYCSLMVDRIYKIAGLNVSRNYEISGIITPGEINAAAYNFYMSYTIAGILPSVLPKRLIKPTLKEKFIGYNKEIVDAIELKKSKEKIFGRACNITNLWCSGS

SEQ ID NO: 107 - DNA, 1617 bp, Borrelia burgdorferi
atgaagaatattaatagattaatattattaatattaactacacacactttattattctcttgtgccttaattgcagataataagtcaaaaaatttaagcacatcagaaatcatattaacacaaaaaacactactagaaagctctttaataaaaaatccttctaatgtagaatatcgaataccaatatccagtatccaagaaattttaaacaataacaatgattcttttttaataaaaaaaacagcagcaaaaatcaaaataagccctcaaaaacttgaagaaataaaaaactatctaaatgcttataaaaattatctaaataatgaaacagaatggataaagtttatagatcaaagtagcgtcaatggaaatttaacaattaaaattgatactgcttttgaaaaaaaaacaaattttaatcatacaaattcagataatgaaaatttaacagaactaatagaactacaaatgcatctggaaaaagaaattttaaacttaattgagcaaacatttcatgataaaaatttaggatatatacaattaagtcacatcaactcattctttcctcaagaaaatataaactcaataacaaaagaaataatagatggaaaagaatatattgcaccgcacataatagcaaatcaattattaaaaataaaagataaaaaatattttgaacaatttatgcactttttaaaagttgaaaacagcaaaataaaaacaataattgaaaaacaaaaaatttcagatcttcacaatgaactgtattattcaaaacaatccccgcccagaagaagaaaaaggtcaactgccgattccgataataacaataaatacgatataataccaaaaataatagacccaaatacaggcattgaaataactcctaaaaatttaagatctattttatcaaatggcgacataatactaataaaaccaaaaatagattggacagaatttttttatttttggcaacatgtgggaatatttgatgaagaaaaatatgaagccactaaaaaaattgcattcaatggaattgatagctttgatataaaatcaataattacaagcaatcaaatcaaattcgatacagcatctactcaaggttcaggatacgaaaagctttcaacatacgtacaatcaagaatattaaaaatattctcaccaataacagacataagaacaattcaaaaagctattaattttggaagaagtagatacattgacaataactttggatatatggttccattaatatcctctaatttatggacagattcattcaatcttgaagaaattcacaacaaaacctattgctctttaatggttgatagaatatataaaatagcaggacttaatgtatcaagaaattacgaaatttcgggaataattactcctggagaaataaatgcagcagcttacaatttttacatgtcttatacgattgcaggaatacttccaagcgtgcttccaaaaaggctcattaaaccaacattaaaagaaaaattcattggttacaataaagaaatagtagatgcaatagaattaaaaaaatcgaaagaaaaaatttttgggagagcttgcaacattacaaatctctggtgctcaggaagttaa

SEQ ID NO: 108 - DNA, 1557 bp, Borrelia burgdorferi
tgtgccttaattgcagataataagtcaaaaaatttaagcacatcagaaatcatattaacacaaaaaacactactagaaagctctttaataaaaaatccttctaatgtagaatatcgaataccaatatccagtatccaagaaattttaaacaataacaatgattcttttttaataaaaaaaacagcagcaaaaatcaaaataagccctcaaaaacttgaagaaataaaaaactatctaaatgcttataaaaattatctaaataatgaaacagaatggataaagtttatagatcaaagtagcgtcaatggaaatttaacaattaaaattgatactgcttttgaaaaaaaaacaaattttaatcatacaaattcagataatgaaaatttaacagaactaatagaactacaaatgcatctggaaaaagaaattttaaacttaattgagcaaacatttcatgataaaaatttaggatatatacaattaagtcacatcaactcattctttcctcaagaaaatataaactcaataacaaaagaaataatagatggaaaagaatatattgcaccgcacataatagcaaatcaattattaaaaataaaagataaaaaatattttgaacaatttatgcactttttaaaagttgaaaacagcaaaataaaaacaataattgaaaaacaaaaaatttcagatcttcacaatgaactgtattattcaaaacaatccccgcccagaagaagaaaaaggtcaactgccgattccgataataacaataaatacgatataataccaaaaataatagacccaaatacaggcattgaaataactcctaaaaatttaagatctattttatcaaatggcgacataatactaataaaaccaaaaatagattggacagaatttttttatttttggcaacatgtgggaatatttgatgaagaaaaatatgaagccactaaaaaaattgcattcaatggaattgatagctttgatataaaatcaataattacaagcaatcaaatcaaattcgatacagcatctactcaaggttcaggatacgaaaagctttcaacatacgtacaatcaagaatattaaaaatattctcaccaataacagacataagaacaattcaaaaagctattaattttggaagaagtagatacattgacaataactttggatatatggttccattaatatcctctaatttatggacagattcattcaatcttgaagaaattcacaacaaaacctattgctctttaatggttgatagaatatataaaatagcaggacttaatgtatcaagaaattacgaaatttcgggaataattactcctggagaaataaatgcagcagcttacaatttttacatgtcttatacgattgcaggaatacttccaagcgtgcttccaaaaaggctcattaaaccaacattaaaagaaaaattcattggttacaataaagaaatagtagatgcaatagaattaaaaaaatcgaaagaaaaaatttttgggagagcttgcaacattacaaatctctggtgctcaggaagttaa

SEQ ID NO: 109 - protein, 186 aa, Borrelia burgdorferi
MTRVFSKFFLFFCFSMLLFANSEDSNEKDIVSKDENPVFENEVLGYWVGYNDVSNIKNSIIYIYKYNGEVYGRILTIIKDGKKYDAKNPSGDTVVGFENLAIEGLDFMWGLKYSSSSKKWDRGKIIDPKNGKIYNSEMRVDSKTGNLITKGKVWIFGRSKIWTRAKDDEIPKLDLHNLVPAPPVKK

SEQ ID NO: 110 - protein, 164 aa, Borrelia burgdorferi
EDSNEKDIVSKDENPVFENEVLGYWVGYNDVSNIKNSIIYIYKYNGEVYGRILTIIKDGKKYDAKNPSGDTVVGFENLAIEGLDFMWGLKYSSSSKKWDRGKIIDPKNGKIYNSEMRVDSKTGNLITKGKVWIFGRSKIWTRAKDDEIPKLDLHNLVPAPPVKK

SEQ ID NO: 111 - DNA, 561 bp, Borrelia burgdorferi
atgactagagttttttcaaagttttttctttttttttgtttttcaatgcttttatttgcaaattcagaagattcaaatgaaaaggacattgttagcaaggatgaaaaccctgtttttgaaaatgaagttttaggatattgggttggttataatgatgtaagtaacataaagaattctattatctatatttataaatataatggggaagtttatggccgaattttaactataataaaagatggcaaaaagtatgatgctaaaaatccttcaggagatactgtagttgggtttgaaaatcttgcaatagagggtcttgattttatgtggggtcttaagtattcttcttcttctaaaaagtgggataggggcaaaataatagatcctaaaaacggtaaaatttataattctgagatgcgtgttgatagtaaaaccggaaatcttattaccaaggggaaagtttggatttttggtagaagtaaaatttggacaagagctaaagatgatgaaataccaaaattagatttgcataatcttgttccagcgccccctgtgaaaaaataa

SEQ ID NO: 112 - DNA, 495 bp, Borrelia burgdorferi
gaagattcaaatgaaaaggacattgttagcaaggatgaaaaccctgtttttgaaaatgaagttttaggatattgggttggttataatgatgtaagtaacataaagaattctattatctatatttataaatataatggggaagtttatggccgaattttaactataataaaagatggcaaaaagtatgatgctaaaaatccttcaggagatactgtagttgggtttgaaaatcttgcaatagagggtcttgattttatgtggggtcttaagtattcttcttcttctaaaaagtgggataggggcaaaataatagatcctaaaaacggtaaaatttataattctgagatgcgtgttgatagtaaaaccggaaatcttattaccaaggggaaagtttggatttttggtagaagtaaaatttggacaagagctaaagatgatgaaataccaaaattagatttgcataatcttgttccagcgccccctgtgaaaaaataa

SEQ ID NO: 113 - protein, 335 aa, Borrelia burgdorferi
MNKLMLMLITFATSLLAQTNKASTGLKTDQSFNNSLSESVKLKEIADIYPTNTNFLTGIGIVAGLAGKGDSIKQKDLIIKILEENNIINEIGSNNIESKNIALVNVSLQVKGNTIKGSKHKACVASILDSKDLTNGILLKTNLKNKEGEIIAIASGITQPNNKLKGSGYTIDSVIINENQNINHSYNIILKKGNYTLINRIHKILTSKKINNKIKSDSTIEIEAKNISLLEEIENIKIETNPKILIDKKNGIILASENAKIGTFTFSIEKDNQNIFLSKNNKTTIQVNSMKLNEFILKNSNNLSNKELIQIIQAAQKINKLNGELILEEIDGNQN

SEQ ID NO: 114 - protein, 310 aa, Borrelia burgdorferi
LKTDQSFNNSLSESVKLKEIADIYPTNTNFLTGIGIVAGLAGKGDSIKQKDLIIKILEENNIINEIGSNNIESKNIALVNVSLQVKGNTIKGSKHKACVASILDSKDLTNGILLKTNLKNKEGEIIAIASGITQPNNKLKGSGYTIDSVIINENQNINHSYNIILKKGNYTLINRIHKILTSKKINNKIKSDSTIEIEAKNISLLEEIENIKIETNPKILIDKKNGIILASENAKIGTFTFSIEKDNQNIFLSKNNKTTIQVNSMKLNEFILKNSNNLSNKELIQIIQAAQKINKLNGELILEEIDGNQN

SEQ ID NO: 115 - DNA, 1008 bp, Borrelia burgdorferi
atgaacaaactaatgttgatgttaattacatttgcaacgagtctattagcccaaacaaacaaagcttcaacaggactaaaaacagatcaatcatttaacaatagcctatctgaaagcgtaaaattaaaagaaattgcggatatttatcccacaaatacaaattttttaacaggtattggaatagtagcgggacttgctggaaaaggagactctataaaacaaaaagaccttataattaaaattttagaagaaaacaatataataaatgaaataggctctaataacatagaaagtaaaaatattgcactagtaaatgtcagtctccaagtaaaaggtaatacaatcaaaggttcaaaacataaagcttgcgttgcatcaatactggactcaaaagatttaacaaatggaatacttttaaaaacaaatcttaaaaataaagagggggaaataatagcaattgcatcaggaattacacagcccaataataaattaaaaggatctggatatactatagatagtgtaataataaatgagaatcaaaatattaaccacagttataatataattcttaaaaaaggaaattatacattaataaatagaattcataaaatattaacctctaaaaaaatcaacaacaaaattaaatcagacagcacaatagaaatagaagcaaaaaacataagcctattagaagagattgaaaatattaaaatagaaaccaaccccaagatattaatagacaaaaaaaatggtattattttagcaagtgaaaatgcaaaaataggaacttttacattttccattgaaaaagacaatcaaaacatttttttaagtaaaaataacaaaacaacaattcaagtaaactcaatgaaattaaatgaatttatattaaaaaattccaacaatcttagcaataaagaattaattcaaataattcaagctgcgcaaaaaattaataaattaaatggggaacttatcttggaggaaattgatggaaaccaaaattaa

SEQ ID NO: 116 - DNA, 933 bp, Borrelia burgdorferi
ctaaaaacagatcaatcatttaacaatagcctatctgaaagcgtaaaattaaaagaaattgcggatatttatcccacaaatacaaattttttaacaggtattggaatagtagcgggacttgctggaaaaggagactctataaaacaaaaagaccttataattaaaattttagaagaaaacaatataataaatgaaataggctctaataacatagaaagtaaaaatattgcactagtaaatgtcagtctccaagtaaaaggtaatacaatcaaaggttcaaaacataaagcttgcgttgcatcaatactggactcaaaagatttaacaaatggaatacttttaaaaacaaatcttaaaaataaagagggggaaataatagcaattgcatcaggaattacacagcccaataataaattaaaaggatctggatatactatagatagtgtaataataaatgagaatcaaaatattaaccacagttataatataattcttaaaaaaggaaattatacattaataaatagaattcataaaatattaacctctaaaaaaatcaacaacaaaattaaatcagacagcacaatagaaatagaagcaaaaaacataagcctattagaagagattgaaaatattaaaatagaaaccaaccccaagatattaatagacaaaaaaaatggtattattttagcaagtgaaaatgcaaaaataggaacttttacattttccattgaaaaagacaatcaaaacatttttttaagtaaaaataacaaaacaacaattcaagtaaactcaatgaaattaaatgaatttatattaaaaaattccaacaatcttagcaataaagaattaattcaaataattcaagctgcgcaaaaaattaataaattaaatggggaacttatcttggaggaaattgatggaaaccaaaattaa

SEQ ID NO: 117 - protein, 117 aa, Borrelia burgdorferi
MCPITFTIPFFLAIFFAFSSSFVTDSSVSLLSRNTSLFSTLTPISLPIISGTLPAIVTLSKKYLSISLSFSKMIFIKSLFEVIKLPIWLFIIFASGYFLNAFSIFLCISSFLSFMFI

SEQ ID NO: 118 - protein, 98 aa, Borrelia burgdorferi
SSFVTDSSVSLLSRNTSLFSTLTPISLPIISGTLPAIVTLSKKYLSISLSFSKMIFIKSLFEVIKLPIWLFIIFASGYFLNAFSIFLCISSFLSFMFI

SEQ ID NO: 119 - DNA, 354 bp, Borrelia burgdorferi
atgtgtcctattacttttaccattccattttttctagcaatattttttgctttttcaagctcctttgttacggactcttctgtgtctttgctatcaagaaatacgtctcttttttctactttaactccaatttctttgcctattatttctggtacgcttcctgcaatagttacgctgtcgaaaaaatatctgtcaatctctttaagcttttctaaaatgattttcatcaaatctttatttgaagtgattaaacttcccatatggttattcattatttttgcatcaggatactttttaaatgctttttcgatttttttgtgtatttcttcttttttatcttttatgtttatatga

SEQ ID NO: 120 - DNA, 297 bp, Borrelia burgdorferi
agctcctttgttacggactcttctgtgtctttgctatcaagaaatacgtctcttttttctactttaactccaatttctttgcctattatttctggtacgcttcctgcaatagttacgctgtcgaaaaaatatctgtcaatctctttaagcttttctaaaatgattttcatcaaatctttatttgaagtgattaaacttcccatatggttattcattatttttgcatcaggatactttttaaatgctttttcgatttttttgtgtatttcttcttttttatcttttatgtttatatga

SEQ ID NO: 121 - protein, 309 aa, Borrelia burgdorferi
MANVALSSGFISQKIFGIIIIMVFLPTIIATPIINFLFKINKSGLKKELPIDQNTHICVSFEYDNLAKILIWDFKNELRKEGFFTQQIKNDSSQYINARKNNISFSIKREGSKITFECPNNHLIIIQDLFRETILNLEKITKEVETVSLRAKKLDYSINYDKILSNINLNKRIKKENIILELKSSNKADVIRELLSVINIEIDKERIFQDLMEREKLITTALKEGFAIPHLKTNLISKIHIAIGISHEGIDFNALDKNLSHVFILILCPAKDYVSYPRILASVVGKVDLYKKEILNAKTDKEIYNIIVS

SEQ ID NO: 122 - protein, 287 aa, Borrelia burgdorferi
VFLPTIIATPIINFLFKINKSGLKKELPIDQNTHICVSFEYDNLAKILIWDFKNELRKEGFFTQQIKNDSSQYINARKNNISFSIKREGSKITFECPNNHLIIIQDLFRETILNLEKITKEVETVSLRAKKLDYSINYDKILSNINLNKRIKKENIILELKSSNKADVIRELLSVINIEIDKERIFQDLMEREKLITTALKEGFAIPHLKTNLISKIHIAIGISHEGIDFNALDKNLSHVFILILCPAKDYVSYPRILASVVGKVDLYKKEILNAKTDKEIYNIIVS

SEQ ID NO: 123 - DNA, 930 bp, Borrelia burgdorferi
atggcaaatgtagcattatcttcaggatttattagccaaaaaatatttggaatcataataataatggtgtttttgccaacaatcattgcaacacccataataaactttttatttaaaataaataaaagtggacttaaaaaagaactcccaatagatcaaaatacacacatatgcgtatcatttgaatatgataatttagccaaaattcttatatgggactttaaaaatgagttaagaaaagaaggattttttacacaacaaattaaaaatgattcttcacaatatattaatgcaagaaaaaacaatatatccttctcaataaaacgagaaggtagcaaaatcacatttgaatgcccaaataatcatttaattataatacaagatctttttagagaaacaatcttaaacctagaaaaaataaccaaagaagttgaaacagtctctttaagagcaaaaaaactagattactcaataaattacgataaaatccttagtaatatcaacctaaataaaagaataaaaaaggaaaacattattctagaattaaaatcaagcaataaggctgatgtaataagagagcttctaagcgtaataaacattgaaattgataaagaaagaatattccaagatttaatggaaagagaaaagttaattactactgcactaaaagaaggctttgccattccccatttaaaaacaaatttaatatcaaaaatacatattgcaataggaataagccatgagggaattgactttaatgctcttgacaagaacttaagtcatgtttttatattaatactgtgcccagcaaaagattacgttagctaccctagaattttagcatctgttgtgggcaaagttgatctgtacaaaaaagaaattttaaatgcaaaaacagataaagaaatttataatataatagtgagctaa

SEQ ID NO: 124 - DNA, 861 bp, Borrelia burgdorferi
tttttgccaacaatcattgcaacacccataataaactttttatttaaaataaataaaagtggacttaaaaaagaactcccaatagatcaaaatacacacatatgcgtatcatttgaatatgataatttagccaaaattcttatatgggactttaaaaatgagttaagaaaagaaggattttttacacaacaaattaaaaatgattcttcacaatatattaatgcaagaaaaaacaatatatccttctcaataaaacgagaaggtagcaaaatcacatttgaatgcccaaataatcatttaattataatacaagatctttttagagaaacaatcttaaacctagaaaaaataaccaaagaagttgaaacagtctctttaagagcaaaaaaactagattactcaataaattacgataaaatccttagtaatatcaacctaaataaaagaataaaaaaggaaaacattattctagaattaaaatcaagcaataaggctgatgtaataagagagcttctaagcgtaataaacattgaaattgataaagaaagaatattccaagatttaatggaaagagaaaagttaattactactgcactaaaagaaggctttgccattccccatttaaaaacaaatttaatatcaaaaatacatattgcaataggaataagccatgagggaattgactttaatgctcttgacaagaacttaagtcatgtttttatattaatactgtgcccagcaaaagattacgttagctaccctagaattttagcatctgttgtgggcaaagttgatctgtacaaaaaagaaattttaaatgcaaaaacagataaagaaatttataatataatagtgagctaa

SEQ ID NO: 125 - protein, 285 aa, Borrelia burgdorferi
MEKPQGVSIVGAISGAMHVHLMAEHYGVPVVLHTDHCAKNLLPWVEGLLEYGEKYYSQHKKPLFSSHMLDLSEEPIKENIEISKKFLERMAKIEMFLEIELGITGGEEDGVDNSDRALHELFSTPEDIYYGYSELLKVSPNFQIAAAFGNVHGVYKPGNVKLTPKVLKDGQDYVISKTGVNMAKPVSYVFHGGSGSTIDEINEALSYGVVKMNIDTDTQWAAWEGVLNYYKKNESRLQGQLGDGKDIDIPNKKFYDPRVWLREAEVSMKDRVKIACKNLNNINRN

SEQ ID NO: 126 - protein, 269 aa, Borrelia burgdorferi
MHVHLMAEHYGVPVVLHTDHCAKNLLPWVEGLLEYGEKYYSQHKKPLFSSHMLDLSEEPIKENIEISKKFLERMAKIEMFLEIELGITGGEEDGVDNSDRALHELFSTPEDIYYGYSELLKVSPNFQIAAAFGNVHGVYKPGNVKLTPKVLKDGQDYVISKTGVNMAKPVSYVFHGGSGSTIDEINEALSYGVVKMNIDTDTQWAAWEGVLNYYKKNESRLQGQLGDGKDIDIPNKKFYDPRVWLREAEVSMKDRVKIACKNLNNINRN

SEQ ID NO: 127 - DNA, 858 bp, Borrelia burgdorferi
atggaaaaaccacaaggagtttcaatagttggagctatttctggtgctatgcatgttcatttaatggcagagcattatggtgttcctgttgttcttcatactgatcactgtgctaaaaatttgcttccttgggttgaaggccttttagaatatggagagaaatactatagtcagcacaaaaaaccattattttcttcacatatgttagatttatcagaagaacctattaaagaaaatattgaaatttctaaaaaattcttagaaagaatggcaaaaattgaaatgtttttggaaatagagcttggaattacgggtggggaagaggatggagttgacaattcagatagagctttgcatgaactattttctactcctgaggatatttattatggatattcagaacttttaaaagttagcccaaattttcagattgcagcagcttttggaaatgttcatggggtatataaaccggggaatgttaagcttactccaaaagttttaaaagatggtcaagattatgtcatatcaaaaacaggagtaaatatggctaagccagtttcttatgtttttcatggagggtctggatctacaattgatgagattaatgaggcgctttcttatggcgttgtaaagatgaatattgacacagatacacagtgggctgcctgggagggtgttttaaattattacaaaaaaaatgaaagtcgtttgcaaggtcaattaggagatggcaaggatattgatattccaaataagaaattttatgatccaagggtttggttaagagaagctgaagtttctatgaaagaccgtgtgaagattgcatgcaaaaatcttaataatattaatagaaattaa

SEQ ID NO: 128 - DNA, 810 bp, Borrelia burgdorferi
atgcatgttcatttaatggcagagcattatggtgttcctgttgttcttcatactgatcactgtgctaaaaatttgcttccttgggttgaaggccttttagaatatggagagaaatactatagtcagcacaaaaaaccattattttcttcacatatgttagatttatcagaagaacctattaaagaaaatattgaaatttctaaaaaattcttagaaagaatggcaaaaattgaaatgtttttggaaatagagcttggaattacgggtggggaagaggatggagttgacaattcagatagagctttgcatgaactattttctactcctgaggatatttattatggatattcagaacttttaaaagttagcccaaattttcagattgcagcagcttttggaaatgttcatggggtatataaaccggggaatgttaagcttactccaaaagttttaaaagatggtcaagattatgtcatatcaaaaacaggagtaaatatggctaagccagtttcttatgtttttcatggagggtctggatctacaattgatgagattaatgaggcgctttcttatggcgttgtaaagatgaatattgacacagatacacagtgggctgcctgggagggtgttttaaattattacaaaaaaaatgaaagtcgtttgcaaggtcaattaggagatggcaaggatattgatattccaaataagaaattttatgatccaagggtttggttaagagaagctgaagtttctatgaaagaccgtgtgaagattgcatgcaaaaatcttaataatattaatagaaattaa

SEQ ID NO: 129 - protein, 650 aa, Borrelia burgdorferi
MPSSFPFLLVNGSSGIAVGMATNMAPHNLREICDAIVYMLDNENASIFDLLKIVKGPDFPTFGEIVYNDNLIKAYKTGKGSVVIRARYHIEERAEDRNAIIVTEIPYTVNKSALLMKVALLAKEEKLEGLLDIRDESDREGIRIVLEVKRGFDPHVIMNLLYEYTEFKKHFSINNLALVNGIPKQLNLEELLFEFIEHRKNIIERRIEFDLRKAKEKAHVLEGLNIALNNIDEVIKIIKSSKLAKDARERLVSNFGLSEIQANSVLDMRLQKLTALEIFKLEEELNILLSLIKDYEDILLNPVRIINIIREETINLGLKFGDERRTKIIYDEEVLKTSMSDLMQKENIVVMLTKKGFLKRLSQNEYKLQGTGGKGLSSFDLNDGDEIVIALCVNTHDYLFMISNEGKLYLINAYEIKDSSRASKGQNISELINLGDQEEILTIKNSKDLTDDAYLLLTTASGKIARFESTDFKAVKSRGVIVIKLNDKDFVTSAEIVFKDEKVICLSKKGSAFIFNSRDVRLTNRGTQGVCGMKLKEGDLFVKVLSVKENPYLLIVSENGYGKRLNMSKISELKRGATGYTSYKKSDKKAGSVVDAIAVSEDDEILLVSKRSKALRTVAGKVSEQGKDARGIQVLFLDNDSLVSVSKFIK

SEQ ID NO: 130 - protein, 631 aa, Borrelia burgdorferi
MATNMAPHNLREICDAIVYMLDNENASIFDLLKIVKGPDFPTFGEIVYNDNLIKAYKTGKGSVVIRARYHIEERAEDRNAIIVTEIPYTVNKSALLMKVALLAKEEKLEGLLDIRDESDREGIRIVLEVKRGFDPHVIMNLLYEYTEFKKHFSINNLALVNGIPKQLNLEELLFEFIEHRKNIIERRIEFDLRKAKEKAHVLEGLNIALNNIDEVIKIIKSSKLAKDARERLVSNFGLSEIQANSVLDMRLQKLTALEIFKLEEELNILLSLIKDYEDILLNPVRIINIIREETINLGLKFGDERRTKIIYDEEVLKTSMSDLMQKENIVVMLTKKGFLKRLSQNEYKLQGTGGKGLSSFDLNDGDEIVIALCVNTHDYLFMISNEGKLYLINAYEIKDSSRASKGQNISELINLGDQEEILTIKNSKDLTDDAYLLLTTASGKIARFESTDFKAVKSRGVIVIKLNDKDFVTSAEIVFKDEKVICLSKKGSAFIFNSRDVRLTNRGTQGVCGMKLKEGDLFVKVLSVKENPYLLIVSENGYGKRLNMSKISELKRGATGYTSYKKSDKKAGSVVDAIAVSEDDEILLVSKRSKALRTVAGKVSEQGKDARGIQVLFLDNDSLVSVSKFIK

SEQ ID NO: 131 - DNA, 1953 bp, Borrelia burgdorferi
atgccgtcatcatttccatttcttttggtaaatggctctagtggaattgctgttggaatggctactaatatggcacctcataatttaagagaaatttgtgatgccattgtttacatgctagataatgagaatgcttctatatttgatttgcttaaaatagttaaagggcctgatttcccaacttttggagagattgtttataatgataatttaattaaagcatacaaaactggcaagggaagtgttgttattagggcaagatatcatattgaagaaagagcagaagatagaaatgctataattgttacagaaataccttatacggtaaataaatctgcacttcttatgaaagttgcgcttttagcaaaagaagaaaagctagaaggacttttagatataagagatgaatctgatcgagaaggtattaggatagttcttgaagttaaaagaggatttgatcctcatgttattatgaatttgctttatgaatatactgaatttaaaaagcattttagtataaataatttagcccttgttaatggtattcccaaacagttaaatttagaagaattgttatttgaatttattgagcatagaaaaaatattatcgaaagacgtattgaatttgacttgagaaaggcaaaagagaaagcacatgttcttgagggattaaatattgctttaaataatatagatgaggttattaagattattaaatcatctaaattagcaaaagatgcaagggagaggcttgtttcgaattttggtctttcagagattcaggccaattcagttcttgatatgaggttacaaaaacttacagcccttgagatttttaagcttgaagaggagcttaatatactgttaagcttaataaaagattatgaagatattctcttgaatccagtaaggattattaatattataagagaagaaactattaatttaggtttgaaatttggcgatgaacgtcgaactaaaataatttatgatgaggaggttttaaaaactagtatgtcggatttaatgcaaaaagaaaatattgttgttatgcttacaaagaaaggtttccttaaaagactttcacaaaatgagtataaattgcaaggtacgggaggaaaaggactaagttcgtttgatctaaatgatggagatgagattgttattgctttgtgtgtcaatactcatgattatttatttatgatttcaaatgaaggaaagctttatttaatcaatgcttatgaaataaaagattcttcaagagcttcaaaaggtcagaatattagtgagcttattaatttaggagatcaagaagaaatattaactattaagaatagtaaagatttaactgatgatgcttatttattgcttacaactgcaagtggaaagatagctagattcgaatctacagattttaaagcagtaaagtcacgaggtgttattgttattaaactgaatgataaagattttgttacaagtgcagagattgtttttaaggatgaaaaagtaatttgtctttctaaaaagggtagtgcatttatatttaattcaagggatgttaggcttactaatagaggtacccaaggtgtttgtggaatgaaattaaaagaaggtgatttgtttgttaaagttttatcggttaaagaaaatccttatcttttgattgtttctgaaaatgggtatggaaaaaggttaaacatgtctaaaatatctgagcttaaaagaggagccactggttatactagttataaaaaatctgataaaaaagcgggtagtgttgttgatgctatagcagtttcagaggatgatgaaatcttgcttgtaagtaaacgttcaaaagctttaagaacagtagctggaaaagtatctgaacaaggcaaagatgctagaggaattcaagtattatttcttgataatgacagcttggtttctgtttcaaaatttattaaataa

SEQ ID NO: 132 - DNA, 1896 bp, Borrelia burgdorferi
atggctactaatatggcacctcataatttaagagaaatttgtgatgccattgtttacatgctagataatgagaatgcttctatatttgatttgcttaaaatagttaaagggcctgatttcccaacttttggagagattgtttataatgataatttaattaaagcatacaaaactggcaagggaagtgttgttattagggcaagatatcatattgaagaaagagcagaagatagaaatgctataattgttacagaaataccttatacggtaaataaatctgcacttcttatgaaagttgcgcttttagcaaaagaagaaaagctagaaggacttttagatataagagatgaatctgatcgagaaggtattaggatagttcttgaagttaaaagaggatttgatcctcatgttattatgaatttgctttatgaatatactgaatttaaaaagcattttagtataaataatttagcccttgttaatggtattcccaaacagttaaatttagaagaattgttatttgaatttattgagcatagaaaaaatattatcgaaagacgtattgaatttgacttgagaaaggcaaaagagaaagcacatgttcttgagggattaaatattgctttaaataatatagatgaggttattaagattattaaatcatctaaattagcaaaagatgcaagggagaggcttgtttcgaattttggtctttcagagattcaggccaattcagttcttgatatgaggttacaaaaacttacagcccttgagatttttaagcttgaagaggagcttaatatactgttaagcttaataaaagattatgaagatattctcttgaatccagtaaggattattaatattataagagaagaaactattaatttaggtttgaaatttggcgatgaacgtcgaactaaaataatttatgatgaggaggttttaaaaactagtatgtcggatttaatgcaaaaagaaaatattgttgttatgcttacaaagaaaggtttccttaaaagactttcacaaaatgagtataaattgcaaggtacgggaggaaaaggactaagttcgtttgatctaaatgatggagatgagattgttattgctttgtgtgtcaatactcatgattatttatttatgatttcaaatgaaggaaagctttatttaatcaatgcttatgaaataaaagattcttcaagagcttcaaaaggtcagaatattagtgagcttattaatttaggagatcaagaagaaatattaactattaagaatagtaaagatttaactgatgatgcttatttattgcttacaactgcaagtggaaagatagctagattcgaatctacagattttaaagcagtaaagtcacgaggtgttattgttattaaactgaatgataaagattttgttacaagtgcagagattgtttttaaggatgaaaaagtaatttgtctttctaaaaagggtagtgcatttatatttaattcaagggatgttaggcttactaatagaggtacccaaggtgtttgtggaatgaaattaaaagaaggtgatttgtttgttaaagttttatcggttaaagaaaatccttatcttttgattgtttctgaaaatgggtatggaaaaaggttaaacatgtctaaaatatctgagcttaaaagaggagccactggttatactagttataaaaaatctgataaaaaagcgggtagtgttgttgatgctatagcagtttcagaggatgatgaaatcttgcttgtaagtaaacgttcaaaagctttaagaacagtagctggaaaagtatctgaacaaggcaaagatgctagaggaattcaagtattatttcttgataatgacagcttggtttctgtttcaaaatttattaaataa

SEQ ID NO: 133 - protein, 105 aa, Borrelia burgdorferi
MFALIRKIFMIYFLCITLAGFAMIFIDSKFTEQPNVKENQSKINQHTIEPNLIMFTSSIGGFLGVYVGIWIFNYDKSNFYLNWGNLIILIYNIALIITVYSKSHS

SEQ ID NO: 134 - protein, 83 aa, Borrelia burgdorferi
MIFIDSKFTEQPNVKENQSKINQHTIEPNLIMFTSSIGGFLGVYVGIWIFNYDKSNFYLNWGNLIILIYNIALIITVYSKSHS

SEQ ID NO: 135 - DNA, 318 bp, Borrelia burgdorferi
atgtttgcattaattagaaaaatatttatgatctattttttatgcattactcttgcaggttttgccatgatttttattgacagcaaatttaccgaacagcctaatgttaaagaaaatcaaagcaaaattaatcaacatacaattgaacccaatttaatcatgtttacatcttctataggaggatttttaggtgtttatgttggaatttggatctttaactatgacaaaagcaatttttacctaaattggggaaatttaataatattaatatacaacatagccctaattatcactgtatactcaaaatcacatagttag

SEQ ID NO: 136 - DNA, 252 bp, Borrelia burgdorferi
atgatttttattgacagcaaatttaccgaacagcctaatgttaaagaaaatcaaagcaaaattaatcaacatacaattgaacccaatttaatcatgtttacatcttctataggaggatttttaggtgtttatgttggaatttggatctttaactatgacaaaagcaatttttacctaaattggggaaatttaataatattaatatacaacatagccctaattatcactgtatactcaaaatcacatagttag

SEQ ID NO: 137 - protein, 209 aa, Borrelia burgdorferi
MKKTPNTCIFLTLLIISNLNALANEEGNTNEKNDQPKQISNFFSPERGFIYSTGIGIGVGFFLNSNIKHLIFRPYYTFSNNTFDFLIVAMILTRESLNIPKKMQYFKSYIGGGINWHIANLIKKTKYFSATIGIGGRFYLSTNFIEDIRFYEKLPYVIEPYMFIEISSKKAIPLMGLDFKIDFLFLDTFNISFNFTIRYNFKDKNEMET

SEQ ID NO: 138 - protein, 186 aa, Borrelia burgdorferi
NEEGNTNEKNDQPKQISNFFSPERGFIYSTGIGIGVGFFLNSNIKHLIFRPYYTFSNNTFDFLIVAMILTRESLNIPKKMQYFKSYIGGGINWHIANLIKKTKYFSATIGIGGRFYLSTNFIEDIRFYEKLPYVIEPYMFIEISSKKAIPLMGLDFKIDFLFLDTFNISFNFTIRYNFKDKNEMET

SEQ ID NO: 139 - DNA, 630 bp, Borrelia burgdorferi
atgaaaaaaactccaaacacttgtattttcttaacattgcttatcatttccaatttaaatgcacttgcaaatgaagaaggcaatactaatgaaaaaaatgatcaacccaaacaaatctctaatttttttagcccagaaagagggttcatatattcaacaggaattgggattggagttggattttttctaaattcaaatattaaacaccttatctttagaccttattatacattctctaataatacttttgattttttaatcgttgctatgatattaacaagggaaagccttaatatccccaaaaaaatgcaatactttaaatcttatattggaggaggaataaactggcacattgcaaacttaattaaaaaaacaaaatatttttccgccaccattggcataggtggtcgtttttacctatctacaaactttatagaagacattcgattttacgaaaaattgccttatgtaatagagccttatatgtttattgaaatttcttctaaaaaggcaattcctttaatggggttagactttaaaattgattttttatttttagatacatttaacatttcttttaattttactattagatataattttaaggacaaaaacgagatggaaacatga

SEQ ID NO: 140 - DNA, 561 bp, Borrelia burgdorferi
aatgaagaaggcaatactaatgaaaaaaatgatcaacccaaacaaatctctaatttttttagcccagaaagagggttcatatattcaacaggaattgggattggagttggattttttctaaattcaaatattaaacaccttatctttagaccttattatacattctctaataatacttttgattttttaatcgttgctatgatattaacaagggaaagccttaatatccccaaaaaaatgcaatactttaaatcttatattggaggaggaataaactggcacattgcaaacttaattaaaaaaacaaaatatttttccgccaccattggcataggtggtcgtttttacctatctacaaactttatagaagacattcgattttacgaaaaattgccttatgtaatagagccttatatgtttattgaaatttcttctaaaaaggcaattcctttaatggggttagactttaaaattgattttttatttttagatacatttaacatttcttttaattttactattagatataattttaaggacaaaaacgagatggaaacatga

SEQ ID NO: 141 - protein, 328 aa, Borrelia burgdorferi
MIPVVASGGILIALSIAFVGIGPDGPNFAEHPFYKQIADIGSIAFGMMLPVLAGFIAMAIADKPGLTPGLVGGVMSGNVKAGFLGAIFAGFLAGYVARFLARRSVPEWLRPVMPIFVIPLISTIIVGFFMLYFGVYIGKFMGVLESGLKSLQSNSETFGVLGKIFLGLVLGSMITVDMGGPFNKVAFLFGVGLIPQVPEIMGMVAAAIPVPPMAMGLATFLAPKLFENEEKESGKIAFLISFIGISEGAIPFAASDPGRVIPSIVVGGAVSSIIAAFLGVANHAPHGGPIVLPVIDNKFGFIIAIAVGVAVATALVIFLKSLKLKESE

SEQ ID NO: 142 - protein, 267 aa, Borrelia burgdorferi
DKPGLTPGLVGGVMSGNVKAGFLGAIFAGFLAGYVARFLARRSVPEWLRPVMPIFVIPLISTIIVGFFMLYFGVYIGKFMGVLESGLKSLQSNSETFGVLGKIFLGLVLGSMITVDMGGPFNKVAFLFGVGLIPQVPEIMGMVAAAIPVPPMAMGLATFLAPKLFENEEKESGKIAFLISFIGISEGAIPFAASDPGRVIPSIVVGGAVSSIIAAFLGVANHAPHGGPIVLPVIDNKFGFIIAIAVGVAVATALVIFLKSLKLKESE

SEQ ID NO: 143 - DNA, 987 bp, Borrelia burgdorferi
atgattcctgttgttgcaagtggaggaattttaattgctcttagcattgcttttgttgggattggacctgatgggcctaattttgctgagcatccattttataagcagattgcagatattggttctatagcttttgggatgatgttgcccgtgcttgctggttttattgcaatggcaattgctgataagcctggtcttacccccggtcttgttggtggagtaatgtctgggaatgtaaaagcaggtttcttgggcgcaatatttgcgggctttcttgcaggttatgttgcaaggtttttagcaagaagatctgttcctgagtggttaagacctgtaatgcctatatttgtaattccgctaataagcaccattattgtcggcttttttatgctgtattttggtgtttatattggaaaatttatgggggtgcttgagagtgggcttaaatctttacagagtaattcggaaacttttggcgtgttgggtaaaattttcttaggcttagtactaggttcaatgattactgttgatatgggcggaccttttaataaagtggcatttctttttggtgtagggctaattcctcaagtgccagaaataatgggaatggtagcagcagcaattcctgttcctcctatggctatggggcttgcaacctttttagcacctaaattgtttgaaaatgaagaaaaagaatctggtaaaatagcctttttaatttcatttattggtattagcgaaggagctattccttttgctgctagtgatcccggacgggtaatcccttcgatagtggtagggggagctgtatcaagcattattgccgcttttttaggcgttgctaatcatgctccacacggaggaccaatagtacttcctgttattgataataaatttgggtttattattgcaattgctgttggagttgcggttgcaacagctttggtaatttttttgaaatctttaaaattaaaggaatctgaatga

SEQ ID NO: 144 - DNA, 804 bp, Borrelia burgdorferi
gataagcctggtcttacccccggtcttgttggtggagtaatgtctgggaatgtaaaagcaggtttcttgggcgcaatatttgcgggctttcttgcaggttatgttgcaaggtttttagcaagaagatctgttcctgagtggttaagacctgtaatgcctatatttgtaattccgctaataagcaccattattgtcggcttttttatgctgtattttggtgtttatattggaaaatttatgggggtgcttgagagtgggcttaaatctttacagagtaattcggaaacttttggcgtgttgggtaaaattttcttaggcttagtactaggttcaatgattactgttgatatgggcggaccttttaataaagtggcatttctttttggtgtagggctaattcctcaagtgccagaaataatgggaatggtagcagcagcaattcctgttcctcctatggctatggggcttgcaacctttttagcacctaaattgtttgaaaatgaagaaaaagaatctggtaaaatagcctttttaatttcatttattggtattagcgaaggagctattccttttgctgctagtgatcccggacgggtaatcccttcgatagtggtagggggagctgtatcaagcattattgccgcttttttaggcgttgctaatcatgctccacacggaggaccaatagtacttcctgttattgataataaatttgggtttattattgcaattgctgttggagttgcggttgcaacagctttggtaatttttttgaaatctttaaaattaaaggaatctgaatga

SEQ ID NO: 145 - protein, 203 aa, Borrelia burgdorferi
MIKIFKKIYILTLVLGMAHLSFASDNYMVRCSKEEDSTTCIAKLKEIKEKKNYDLFSMGIGIGDPIANIMITIPYINIDFGYGGFIGLKSNNFENYLNGGIDVIFKKQIGQYMKIGGGIGIGADWSKTSLIPPNEEEETDYERIGAVIRIPFIMEYNFAKNLSIGFKIYPAVGPTILLTKPSILFEGIKFNFFGFGFIKFAFN

SEQ ID NO: 146 - protein, 179 aa, Borrelia burgdorferi
DNYMVRCSKEEDSTTCIAKLKEIKEKKNYDLFSMGIGIGDPIANIMITIPYINIDFGYGGFIGLKSNNFENYLNGGIDVIFKKQIGQYMKIGGGIGIGADWSKTSLIPPNEEEETDYERIGAVIRIPFIMEYNFAKNLSIGFKIYPAVGPTILLTKPSILFEGIKFNFFGFGFIKFAFN

SEQ ID NO: 147 - DNA, 612 bp, Borrelia burgdorferi
atgataaaaatttttaaaaaaatatacattttaacattagtattaggtatggcacacctttcttttgcatctgacaattatatggtcagatgcagcaaggaagaagattcaaccacctgtatcgcaaagcttaaagaaataaaagaaaagaaaaattatgacttattttcaatgggcattggaataggagatcctattgcaaatattatgattacaattccttatataaatattgattttggatatggaggttttattggccttaagtcaaacaattttgaaaattatctaaatggtggaatagacgttatttttaaaaagcaaattggacaatatatgaaaattggcggcggcattggaataggtgcggattggtcaaaaacatcccttataccccctaatgaagaagaagaaactgattatgagagaataggcgctgttataagaattccttttataatggaatataattttgcaaaaaatttatccataggattcaaaatttatcctgcagtagggccaacaatattactaacaaaaccaagcattttatttgaaggaattaaattcaatttttttggatttggattcataaaatttgcatttaattaa

SEQ ID NO: 148 - DNA, 540 bp, Borrelia burgdorferi
gacaattatatggtcagatgcagcaaggaagaagattcaaccacctgtatcgcaaagcttaaagaaataaaagaaaagaaaaattatgacttattttcaatgggcattggaataggagatcctattgcaaatattatgattacaattccttatataaatattgattttggatatggaggttttattggccttaagtcaaacaattttgaaaattatctaaatggtggaatagacgttatttttaaaaagcaaattggacaatatatgaaaattggcggcggcattggaataggtgcggattggtcaaaaacatcccttataccccctaatgaagaagaagaaactgattatgagagaataggcgctgttataagaattccttttataatggaatataattttgcaaaaaatttatccataggattcaaaatttatcctgcagtagggccaacaatattactaacaaaaccaagcattttatttgaaggaattaaattcaatttttttggatttggattcataaaatttgcatttaattaa

SEQ ID NO: 149 - protein, 203 aa, Borrelia burgdorferi
MRMLLATIILILTTGLLAAQSKSKSMTEDDFDFDKLLAKEESVRRLFGIGFGVGYPLANITISVPYVDIDLGYGGFVGLKPNNFLPYVVMGVDLLFKDEIHKNTMISGGIGIGADWSKGSPEKSNEKLEEEEENEAQQVASLQNRIGVVIRLPLVIEYSFLKNIVIGFKAVATIGTTMLLGSPMSFEGARFNFLGTGFIKIYI

SEQ ID NO: 150 - protein, 184 aa, Borrelia burgdorferi
QSKSKSMTEDDFDFDKLLAKEESVRRLFGIGFGVGYPLANITISVPYVDIDLGYGGFVGLKPNNFLPYVVMGVDLLFKDEIHKNTMISGGIGIGADWSKGSPEKSNEKLEEEEENEAQQVASLQNRIGVVIRLPLVIEYSFLKNIVIGFKAVATIGTTMLLGSPMSFEGARFNFLGTGFIKIYI

SEQ ID NO: 151 - DNA, 612 bp, Borrelia burgdorferi
atgagaatgctattagcaacaataatacttatattaacaacgggtttattagctgcacaatccaaaagcaaaagtatgactgaagatgactttgattttgataaacttcttgcaaaagaagagtctgtgcgccgtttatttggcataggttttggagttggatatccacttgcaaacattacaatatctgttccatatgtagacatagaccttgggtacggaggattcgtagggcttaaacccaacaatttcttgccctatgttgtgatgggtgtagatcttctatttaaagatgaaatacacaaaaacactatgatttctggaggcattggaataggtgcagattggtcaaaaggaagtcctgaaaaatcaaatgaaaaacttgaagaagaggaagaaaatgaagcacaacaagtagcttctcttcaaaatagaataggggttgtgataagattgcctttggtaatagagtacagctttcttaaaaatattgtgattggatttaaagctgttgctactattggaacaactatgctacttggcagcccaatgtcatttgaaggagctagatttaatttcttaggcacaggctttataaaaatatatatatag

SEQ ID NO: 152 - DNA, 555 bp, Borrelia burgdorferi
caatccaaaagcaaaagtatgactgaagatgactttgattttgataaacttcttgcaaaagaagagtctgtgcgccgtttatttggcataggttttggagttggatatccacttgcaaacattacaatatctgttccatatgtagacatagaccttgggtacggaggattcgtagggcttaaacccaacaatttcttgccctatgttgtgatgggtgtagatcttctatttaaagatgaaatacacaaaaacactatgatttctggaggcattggaataggtgcagattggtcaaaaggaagtcctgaaaaatcaaatgaaaaacttgaagaagaggaagaaaatgaagcacaacaagtagcttctcttcaaaatagaataggggttgtgataagattgcctttggtaatagagtacagctttcttaaaaatattgtgattggatttaaagctgttgctactattggaacaactatgctacttggcagcccaatgtcatttgaaggagctagatttaatttcttaggcacaggctttataaaaatatatatatag

SEQ ID NO: 153 - protein, 400 aa, Borrelia burgdorferi
MNIKINFFFTLPIGIFLGLFFPLGIYSSLSHAFIRLSYLSLIPFLIFSIPLGIENIIENKNFKKLFGKTIYYGILTNLSGVAVSIIAATIYLPQRIPILEKTIQNTCFFEKEALLETFFPKNIFKIFTSSNPNLLSIYMISIIIGTSFYYAKQKGRIARELMLSASNLFYHANGFIVNILNIGIIFITANYAANLKNFKDYPNYTNSITFFLAWTIIILFVILPTISYRLTKSFKMIYKGIFVSFQNIIFSGLAKDSYSPYVILIEDIKNERINIKKSIIINIPLINFVSKFGTIFVSVISFFIILKSYSSLPISIYEISYMSTLSFVFVFAFPHIPNSLIYIITMLCSTYTKGIELNVSNITPMLPILISLALLIDFAFNIAIIHIINFKELKDQEKIN

SEQ ID NO: 154 - protein, 348 aa, Borrelia burgdorferi
IENIIENKNFKKLFGKTIYYGILTNLSGVAVSIIAATIYLPQRIPILEKTIQNTCFFEKEALLETFFPKNIFKIFTSSNPNLLSIYMISIIIGTSFYYAKQKGRIARELMLSASNLFYHANGFIVNILNIGIIFITANYAANLKNFKDYPNYTNSITFFLAWTIIILFVILPTISYRLTKSFKMIYKGIFVSFQNIIFSGLAKDSYSPYVILIEDIKNERINIKKSIIINIPLINFVSKFGTIFVSVISFFIILKSYSSLPISIYEISYMSTLSFVFVFAFPHIPNSLIYIITMLCSTYTKGIELNVSNITPMLPILISLALLIDFAFNIAIIHIINFKELKDQEKIN

SEQ ID NO: 155 - DNA, 1203 bp, Borrelia burgdorferi
atgaatataaaaatcaatttttttttcactttgcctattggaatctttttaggattgtttttccctcttggaatttatagctccttatcacatgcttttataagattatcatacttatctcttattccctttttaatattttcaattccattaggaattgaaaatattattgaaaataaaaactttaaaaagctttttggtaaaacaatttattatggaattttaactaacctatctggagttgctgtatcaataatagctgcaacaatatatcttccgcaaagaattccaatactagaaaaaacaatacaaaatacatgtttttttgaaaaagaagctttactagaaacattctttccaaaaaatattttcaaaatatttacatctagcaatccaaatctactaagcatttacatgatttcaataataataggcacaagtttttattatgcaaaacaaaaaggcagaatagctagagaactgatgctaagcgcatccaatcttttttaccatgcaaatgggtttattgtaaacatattaaatatagggatcatttttataacagcaaattacgctgcaaacttaaaaaacttcaaagattacccaaattatacaaacagcataacattctttttggcatggacaattataattttattcgtaatattgccaacaattagttatagattaacaaaaagttttaaaatgatatataaaggcatttttgtatcatttcaaaacataatattttcaggacttgcaaaagattcttattccccttatgtgatattaatagaagatattaaaaacgaaagaataaatataaaaaaatccataattataaacatacctttaataaattttgtatctaaatttggcactatttttgtttcagtaatatcattttttataattttaaaatcatattctagcttacccatttctatttatgaaataagctatatgagcactttatcatttgtttttgtctttgcatttcctcatataccaaatagtttaatttatataattacaatgctttgctctacatatacaaaaggaatagagctaaatgtttcaaacataacaccaatgctgccgatattaatctctttggctttactaatcgactttgcttttaacattgcaatcattcatataataaacttcaaagaattaaaagatcaagaaaaaattaattaa

SEQ ID NO: 156 - DNA, 1047 bp, Borrelia burgdorferi
attgaaaatattattgaaaataaaaactttaaaaagctttttggtaaaacaatttattatggaattttaactaacctatctggagttgctgtatcaataatagctgcaacaatatatcttccgcaaagaattccaatactagaaaaaacaatacaaaatacatgtttttttgaaaaagaagctttactagaaacattctttccaaaaaatattttcaaaatatttacatctagcaatccaaatctactaagcatttacatgatttcaataataataggcacaagtttttattatgcaaaacaaaaaggcagaatagctagagaactgatgctaagcgcatccaatcttttttaccatgcaaatgggtttattgtaaacatattaaatatagggatcatttttataacagcaaattacgctgcaaacttaaaaaacttcaaagattacccaaattatacaaacagcataacattctttttggcatggacaattataattttattcgtaatattgccaacaattagttatagattaacaaaaagttttaaaatgatatataaaggcatttttgtatcatttcaaaacataatattttcaggacttgcaaaagattcttattccccttatgtgatattaatagaagatattaaaaacgaaagaataaatataaaaaaatccataattataaacatacctttaataaattttgtatctaaatttggcactatttttgtttcagtaatatcattttttataattttaaaatcatattctagcttacccatttctatttatgaaataagctatatgagcactttatcatttgtttttgtctttgcatttcctcatataccaaatagtttaatttatataattacaatgctttgctctacatatacaaaaggaatagagctaaatgtttcaaacataacaccaatgctgccgatattaatctctttggctttactaatcgactttgcttttaacattgcaatcattcatataataaacttcaaagaattaaaagatcaagaaaaaattaattaa

SEQ ID NO: 157 - protein, 219 aa, Borrelia burgdorferi
MKKEFIMLLLLLQTIMNLNSINTNTSTSIVKELQKNLYIFNSKEYQKDKDTLNEFINSININDKEILQSLEKIKNELFIISVFFNNKKGILIALNLGAEINFKYKISPISISIINNEFEITKILIDYGISLNQIDDTGYSPIFWAIYTNNEKIFEFLKESGADLSFTLKNRKTPMQAAIETENIKLIKSLEKKKIYIDDNFKKKLKKLKNKEIVRILVK

SEQ ID NO: 158 - protein, 201 aa, Borrelia burgdorferi
NSINTNTSTSIVKELQKNLYIFNSKEYQKDKDTLNEFINSININDKEILQSLEKIKNELFIISVFFNNKKGILIALNLGAEINFKYKISPISISIINNEFEITKILIDYGISLNQIDDTGYSPIFWAIYTNNEKIFEFLKESGADLSFTLKNRKTPMQAAIETENIKLIKSLEKKKIYIDDNFKKKLKKLKNKEIVRILVK

SEQ ID NO: 159 - DNA, 660 bp, Borrelia burgdorferi
atgaaaaaagaattcattatgcttttactgttattgcaaacaataatgaatttaaactcaataaatactaatacaagtacttcaatagtaaaagaattgcaaaaaaatttatatattttcaatagcaaagaatatcaaaaagataaagacactttaaatgaatttataaattcaataaatataaatgacaaagaaatcttacaaagtttagaaaaaatcaaaaatgagctttttataatatctgtttttttcaacaataaaaaagggattttaattgcactaaatcttggagcagaaataaactttaaatataaaatatctccaatttcaatttcaataataaacaatgaatttgaaatcacaaaaatattgatagattacggaataagccttaatcaaatagatgatacaggttattctccaatattttgggcaatatatactaataacgaaaaaatatttgaatttttaaaagaaagcggagctgatttaagtttcacacttaaaaatagaaaaacaccaatgcaagccgcaatagaaacagaaaatataaaactaattaaatctctggaaaagaaaaaaatttacattgacgacaatttcaaaaaaaaacttaaaaagcttaaaaacaaagaaatagttcgaattttagtaaaatag

SEQ ID NO: 160 - DNA, 606 bp, Borrelia burgdorferi
aactcaataaatactaatacaagtacttcaatagtaaaagaattgcaaaaaaatttatatattttcaatagcaaagaatatcaaaaagataaagacactttaaatgaatttataaattcaataaatataaatgacaaagaaatcttacaaagtttagaaaaaatcaaaaatgagctttttataatatctgtttttttcaacaataaaaaagggattttaattgcactaaatcttggagcagaaataaactttaaatataaaatatctccaatttcaatttcaataataaacaatgaatttgaaatcacaaaaatattgatagattacggaataagccttaatcaaatagatgatacaggttattctccaatattttgggcaatatatactaataacgaaaaaatatttgaatttttaaaagaaagcggagctgatttaagtttcacacttaaaaatagaaaaacaccaatgcaagccgcaatagaaacagaaaatataaaactaattaaatctctggaaaagaaaaaaatttacattgacgacaatttcaaaaaaaaacttaaaaagcttaaaaacaaagaaatagttcgaattttagtaaaatag

SEQ ID NO: 161 - protein, 178 aa, Borrelia burgdorferi
MTKNRIIWLLVLMVSSTFTATIISNYQNLMLSLVVLANFIPLLMDTSGNAGSQASALIIRELALGTVKVKDFFKVFLKEICVSILVGAILASVNFLRIVFFVAPHHSDKLKIAFVVSSCLMVSLTVAKILGGLLPIVAKLLKLDPALMAGPLITTIADAITLIAYFNIAKWVLVSYAV

SEQ ID NO: 162 - protein, 163 aa, Borrelia burgdorferi
STFTATIISNYQNLMLSLVVLANFIPLLMDTSGNAGSQASALIIRELALGTVKVKDFFKVFLKEICVSILVGAILASVNFLRIVFFVAPHHSDKLKIAFVVSSCLMVSLTVAKILGGLLPIVAKLLKLDPALMAGPLITTIADAITLIAYFNIAKWVLVSYAV

SEQ ID NO: 163 - DNA, 537 bp, Borrelia burgdorferi
atgacaaaaaatagaataatttggcttttagttcttatggtgtcttctacttttacagctacaattatttcaaattatcaaaatttaatgttgtctttagtggttttagctaattttattccccttttaatggatacttcaggcaatgccggctctcaggcatctgcgctaataattcgtgagcttgctcttggtactgtcaaggtaaaagatttttttaaagtgtttttaaaggaaatatgtgttagcattctagtgggagcaattcttgctagtgttaattttttaagaattgtcttttttgtagctccacaccattctgataagctgaaaatagcttttgtagtttcatcttgcttgatggtaagtttgacagtagcaaagatattgggaggtcttttacccattgttgctaaacttttaaagttggatccagcacttatggcaggccctttaatcactacaattgcagatgctattactttaatagcttattttaatatagcaaaatgggttttagttagctatgctgtttaa

SEQ ID NO: 164 - DNA, 492 bp, Borrelia burgdorferi
tctacttttacagctacaattatttcaaattatcaaaatttaatgttgtctttagtggttttagctaattttattccccttttaatggatacttcaggcaatgccggctctcaggcatctgcgctaataattcgtgagcttgctcttggtactgtcaaggtaaaagatttttttaaagtgtttttaaaggaaatatgtgttagcattctagtgggagcaattcttgctagtgttaattttttaagaattgtcttttttgtagctccacaccattctgataagctgaaaatagcttttgtagtttcatcttgcttgatggtaagtttgacagtagcaaagatattgggaggtcttttacccattgttgctaaacttttaaagttggatccagcacttatggcaggccctttaatcactacaattgcagatgctattactttaatagcttattttaatatagcaaaatgggttttagttagctatgctgtttaa

SEQ ID NO: 165 - protein, 178 aa, Borrelia burgdorferi; identical to SEQ ID NO: 161

SEQ ID NO: 166 - protein, 128 aa, Borrelia burgdorferi
GSQASALIIRELALGTVKVKDFFKVFLKEICVSILVGAILASVNFLRIVFFVAPHHSDKLKIAFVVSSCLMVSLTVAKILGGLLPIVAKLLKLDPALMAGPLITTIADAITLIAYFNIAKWVLVSYAV

SEQ ID NO: 167 - DNA, 537 bp, Borrelia burgdorferi; identical to SEQ ID NO: 163

SEQ ID NO: 168 - DNA, 387 bp, Borrelia burgdorferi
ggctctcaggcatctgcgctaataattcgtgagcttgctcttggtactgtcaaggtaaaagatttttttaaagtgtttttaaaggaaatatgtgttagcattctagtgggagcaattcttgctagtgttaattttttaagaattgtcttttttgtagctccacaccattctgataagctgaaaatagcttttgtagtttcatcttgcttgatggtaagtttgacagtagcaaagatattgggaggtcttttacccattgttgctaaacttttaaagttggatccagcacttatggcaggccctttaatcactacaattgcagatgctattactttaatagcttattttaatatagcaaaatgggttttagttagctatgctgtttaa

SEQ ID NO: 169 - protein, 373 aa, Borrelia burgdorferi
MRIKNLILIAILLISPSCSTNKNIVVLTDNKTIPFYINQFNIENKANFIIKFRNNIDLQTIEKENAQIIISKNIGNTNIANHFKSVKINYNPDYPILKHIFKQFNYKIIPLGFDIPILIYKNTHHIKKYINTKYLKEEYENFIKDGKFFISPYVSENLFYVISQINNVRFSFEKNKLNYNENQILKMLEYFSSFLNTKQMDLQKDFFNKYGYLKLNKILLNKKSLLIAGLSDITFYNSLSEQEKSQIKFSYLINDNNEIVISNPNFIGILETSVLTKKFINWILYKKTQKTLIGFNNQSQSNICFGFANGFTPYKELNLKIKHSIDGISPFIIDETQINSHSYVLSKKTIEKENLLINEWFFSKANNLKKNKN

SEQ ID NO: 170 - protein, 353 aa, Borrelia burgdorferi
NKNIVVLTDNKTIPFYINQFNIENKANFIIKFRNNIDLQTIEKENAQIIISKNIGNTNIANHFKSVKINYNPDYPILKHIFKQFNYKIIPLGFDIPILIYKNTHHIKKYINTKYLKEEYENFIKDGKFFISPYVSENLFYVISQINNVRFSFEKNKLNYNENQILKMLEYFSSFLNTKQMDLQKDFFNKYGYLKLNKILLNKKSLLIAGLSDITFYNSLSEQEKSQIKFSYLINDNNEIVISNPNFIGILETSVLTKKFINWILYKKTQKTLIGFNNQSQSNICFGFANGFTPYKELNLKIKHSIDGISPFIIDETQINSHSYVLSKKTIEKENLLINEWFFSKANNLKKNKN

SEQ ID NO: 171 - DNA, 1122 bp, Borrelia burgdorferi
atgagaataaaaaatttaatactaatagcaattttattaattagccctagctgttcaacaaataagaacatcgttgtactaactgacaataaaacaataccattttatataaatcaatttaatatagaaaataaagcaaattttataattaagtttagaaataatattgatctgcaaacaatagaaaaagaaaatgcacaaataattatttctaaaaacattggtaacacaaatattgctaaccattttaaatctgtaaaaatcaattataatccagattatcctatcttaaagcatattttcaagcaatttaactacaaaattattccattgggctttgacattcctattttaatctataaaaatacacatcatattaaaaaatacataaacactaaatatctaaaagaagaatacgaaaatttcattaaagatggaaaattttttatatcgccttatgtttctgaaaatttattttatgtgatttctcaaataaataatgtgagattttcttttgaaaaaaataaattaaattataatgagaatcaaattttaaaaatgctagaatatttctcatcatttttaaatacaaaacaaatggacttgcaaaaagatttctttaataaatacggctacctaaagttaaataaaatattgcttaataaaaaatctcttttaatagcaggattgagcgatataaccttctacaatagcttaagcgaacaagagaagtcacaaataaaattttcctatttaataaacgataacaatgaaattgttatctcaaacccaaattttattggcattttagaaacatctgttttaactaaaaaatttatcaactggatattgtataaaaaaactcaaaaaaccctaattggatttaacaatcaatcccaatcaaatatatgttttggatttgccaatggttttaccccttacaaagaattaaatttaaaaataaaacattcaattgatggaatatctccttttattattgacgaaactcaaatcaatagccattcctatgtattaagcaaaaaaacaattgaaaaagaaaacttactaataaatgaatggtttttctctaaagctaataatctaaaaaaaaataaaaattaa

SEQ ID NO: 172 - DNA, 1062 bp, Borrelia burgdorferi
aataagaacatcgttgtactaactgacaataaaacaataccattttatataaatcaatttaatatagaaaataaagcaaattttataattaagtttagaaataatattgatctgcaaacaatagaaaaagaaaatgcacaaataattatttctaaaaacattggtaacacaaatattgctaaccattttaaatctgtaaaaatcaattataatccagattatcctatcttaaagcatattttcaagcaatttaactacaaaattattccattgggctttgacattcctattttaatctataaaaatacacatcatattaaaaaatacataaacactaaatatctaaaagaagaatacgaaaatttcattaaagatggaaaattttttatatcgccttatgtttctgaaaatttattttatgtgatttctcaaataaataatgtgagattttcttttgaaaaaaataaattaaattataatgagaatcaaattttaaaaatgctagaatatttctcatcatttttaaatacaaaacaaatggacttgcaaaaagatttctttaataaatacggctacctaaagttaaataaaatattgcttaataaaaaatctcttttaatagcaggattgagcgatataaccttctacaatagcttaagcgaacaagagaagtcacaaataaaattttcctatttaataaacgataacaatgaaattgttatctcaaacccaaattttattggcattttagaaacatctgttttaactaaaaaatttatcaactggatattgtataaaaaaactcaaaaaaccctaattggatttaacaatcaatcccaatcaaatatatgttttggatttgccaatggttttaccccttacaaagaattaaatttaaaaataaaacattcaattgatggaatatctccttttattattgacgaaactcaaatcaatagccattcctatgtattaagcaaaaaaacaattgaaaaagaaaacttactaataaatgaatggtttttctctaaagctaataatctaaaaaaaaataaaaattaa

SEQ ID NO: 173 - protein, 216 aa, Borrelia burgdorferi
MIKTILLLVLYPVVVFSQISANQYFEGIYAKYQNIEDMQATINFTLKGLKQTGVLLYKFPDKFIINLDSNNQVFVSDGEFLTVYVPSLGTSFNQQLLKGSSGGGLMKVLNSEYSVSYTNSPNLEDLDSSEPGKYIKLTFSRKLYKGAATINSFIIAFAPDGIIRRITAFPTSGGREIVIDLTAVKFNVGILDSKFKYDPPKSSNKVDNFLYDIKKN

SEQ ID NO: 174 - protein, 199 aa, Borrelia burgdorferi
QISANQYFEGIYAKYQNIEDMQATINFTLKGLKQTGVLLYKFPDKFIINLDSNNQVFVSDGEFLTVYVPSLGTSFNQQLLKGSSGGGLMKVLNSEYSVSYTNSPNLEDLDSSEPGKYIKLTFSRKLYKGAATINSFIIAFAPDGIIRRITAFPTSGGREIVIDLTAVKFNVGILDSKFKYDPPKSSNKVDNFLYDIKKN

SEQ ID NO: 175 - DNA, 651 bp, Borrelia burgdorferi
atgataaaaacaatacttttattagttttgtatcctgttgttgtgttttctcaaatatctgcaaatcaatattttgaaggaatttatgctaaatatcaaaatatagaggacatgcaagcaacaattaattttactttaaaggggttaaagcaaacaggtgttttgctttataagtttccagacaagtttattatcaatttagattcaaataatcaagtttttgtaagtgatggtgaatttttgacagtttatgttccatctcttgggacttcttttaatcagcaattattaaagggtagtagtgggggaggtcttatgaaagttttaaatagtgagtatagcgtatcttataccaattctccaaatttagaagatctcgattcatctgagcctggaaaatatattaaattaaccttttctagaaagctttacaagggggctgctactattaattcttttattattgcttttgctccggatggaataattagaagaattactgcttttcctactagtggtgggcgcgaaatagttattgatttgactgctgtgaagtttaatgttggaattcttgatagcaaatttaaatatgatcctccaaaatcttcaaataaggtagataattttttatatgatattaaaaaaaattaa

SEQ ID NO: 176 - DNA, 600 bp, Borrelia burgdorferi
caaatatctgcaaatcaatattttgaaggaatttatgctaaatatcaaaatatagaggacatgcaagcaacaattaattttactttaaaggggttaaagcaaacaggtgttttgctttataagtttccagacaagtttattatcaatttagattcaaataatcaagtttttgtaagtgatggtgaatttttgacagtttatgttccatctcttgggacttcttttaatcagcaattattaaagggtagtagtgggggaggtcttatgaaagttttaaatagtgagtatagcgtatcttataccaattctccaaatttagaagatctcgattcatctgagcctggaaaatatattaaattaaccttttctagaaagctttacaagggggctgctactattaattcttttattattgcttttgctccggatggaataattagaagaattactgcttttcctactagtggtgggcgcgaaatagttattgatttgactgctgtgaagtttaatgttggaattcttgatagcaaatttaaatatgatcctccaaaatcttcaaataaggtagataattttttatatgatattaaaaaaaattaa

SEQ ID NO: 177 - protein, 251 aa, Borrelia burgdorferi
MKERCLYLLVFVALCVNNLFSDDYLIYDFDLSLNEFLEVSTRKDNLEPMVDSNRILLFYPPKKEIRKIFAAFDFDQYSKKYLFKKNEHGVFFVKVNIPHGTSSIKYRLIVDGVWTNDEYNKNVVYNEDLIPFSKIEIAKEKSSYISLRNPIQSYDNNEIEIFYIGRPGQIVTIAGSFNNFNPFLNRLIEKEDNKGIYTIKLKNLPKDRIYYYFIDSGNKVIDKNNVNRINLYFVEGIDNKIDFEVSYFDHK

SEQ ID NO: 178 - protein, 230 aa, Borrelia burgdorferi
DDYLIYDFDLSLNEFLEVSTRKDNLEPMVDSNRILLFYPPKKEIRKIFAAFDFDQYSKKYLFKKNEHGVFFVKVNIPHGTSSIKYRLIVDGVWTNDEYNKNVVYNEDLIPFSKIEIAKEKSSYISLRNPIQSYDNNEIEIFYIGRPGQIVTIAGSFNNFNPFLNRLIEKEDNKGIYTIKLKNLPKDRIYYYFIDSGNKVIDKNNVNRINLYFVEGIDNKIDFEVSYFDHK

SEQ ID NO: 179 - DNA, 756 bp, Borrelia burgdorferi
atgaaagaaaggtgtttgtatttattggtttttgtagctttatgtgttaacaatcttttttcagatgattatttaatttatgactttgatttaagtttaaatgaatttctagaagtttcaacaagaaaagacaatcttgagcctatggttgattccaatcgtatattattgttttatcctcctaaaaaagaaattagaaaaatttttgctgcctttgactttgatcagtattctaagaaatatttattcaaaaaaaatgagcatggagttttttttgttaaagttaatattcctcatggcacaagcagtataaaatataggcttattgtagacggtgtttggactaatgacgagtataataaaaatgtagtttataatgaggatttaatcccattttctaaaattgagatcgctaaagagaagtccagctatatttctttgagaaatccaatacaatcatatgataacaatgaaattgaaattttttacataggtcgtcctggacaaatagttacaatagctggtagttttaacaattttaatccttttttaaataggcttattgagaaagaggacaataagggaatttatactattaagcttaaaaatttacccaaggatagaatttattattattttattgattctggtaacaaagtaatagataaaaataatgttaatagaattaatttatattttgttgagggaattgataataaaatagatttcgaagtttcctattttgatcataagtaa

SEQ ID NO: 180 - DNA, 693 bp, Borrelia burgdorferi
gatgattatttaatttatgactttgatttaagtttaaatgaatttctagaagtttcaacaagaaaagacaatcttgagcctatggttgattccaatcgtatattattgttttatcctcctaaaaaagaaattagaaaaatttttgctgcctttgactttgatcagtattctaagaaatatttattcaaaaaaaatgagcatggagttttttttgttaaagttaatattcctcatggcacaagcagtataaaatataggcttattgtagacggtgtttggactaatgacgagtataataaaaatgtagtttataatgaggatttaatcccattttctaaaattgagatcgctaaagagaagtccagctatatttctttgagaaatccaatacaatcatatgataacaatgaaattgaaattttttacataggtcgtcctggacaaatagttacaatagctggtagttttaacaattttaatccttttttaaataggcttattgagaaagaggacaataagggaatttatactattaagcttaaaaatttacccaaggatagaatttattattattttattgattctggtaacaaagtaatagataaaaataatgttaatagaattaatttatattttgttgagggaattgataataaaatagatttcgaagtttcctattttgatcataagtaa

SEQ ID NO: 181 - protein, 129 aa, Borrelia burgdorferi
MRQRVMIAMALSCHPSLLIADEPTTALDVTIQEQILLLIKNLSKKFNTSTIFITHDLAVVAEICDTVSVMYQGKIVEEGTVEEIFNNPKHPYTIGLLKSILTLEHDPNKKLYSTKENPMKITKTSTEEF

SEQ ID NO: 182 - protein, 108 aa, Borrelia burgdorferi
EPTTALDVTIQEQILLLIKNLSKKFNTSTIFITHDLAVVAEICDTVSVMYQGKIVEEGTVEEIFNNPKHPYTIGLLKSILTLEHDPNKKLYSTKENPMKITKTSTEEF

SEQ ID NO: 183 - DNA, 390 bp, Borrelia burgdorferi
atgagacaaagagttatgattgccatggctcttagctgtcatccatccttattaatagcagatgaaccaacaacagcccttgatgttacaatccaagagcaaatattattattaatcaaaaacctatctaaaaaattcaatacttctaccatatttataactcatgatcttgcggttgttgctgaaatttgtgatacagtatctgtaatgtatcaaggaaaaattgtagaagaaggaacagtagaggaaatatttaacaatcctaagcatccttacaccattgggcttttaaaatcaattcttacgctagaacacgatccaaataaaaagctttattcaacaaaagaaaaccctatgaagatcacaaaaaccagcaccgaggagttttaa

SEQ ID NO: 184 - DNA, 327 bp, Borrelia burgdorferi
gaaccaacaacagcccttgatgttacaatccaagagcaaatattattattaatcaaaaacctatctaaaaaattcaatacttctaccatatttataactcatgatcttgcggttgttgctgaaatttgtgatacagtatctgtaatgtatcaaggaaaaattgtagaagaaggaacagtagaggaaatatttaacaatcctaagcatccttacaccattgggcttttaaaatcaattcttacgctagaacacgatccaaataaaaagctttattcaacaaaagaaaaccctatgaagatcacaaaaaccagcaccgaggagttttaa

SEQ ID NO: 185 - protein, 147 aa, Borrelia burgdorferi
MAIMERSIIGLFIALAFVSWLTVARVVRGQVQSLSSSEFIQAAKTLGATNQRIILKHLIPNSIGMIVIFTTIRVPSFIMAEAFLSFLGLGISAPMTSWGELVQNGIATFVEYPWKVFIPAIVMTIFLLFMNFLGDGLRDAFDPKDSI

SEQ ID NO: 186 - protein, 123 aa, Borrelia burgdorferi
RVVRGQVQSLSSSEFIQAAKTLGATNQRIILKHLIPNSIGMIVIFTTIRVPSFIMAEAFLSFLGLGISAPMTSWGELVQNGIATFVEYPWKVFIPAIVMTIFLLFMNFLGDGLRDAFDPKDSI

SEQ ID NO: 187 - DNA, 444 bp, Borrelia burgdorferi
atggcaataatggaaagaagtataatcggcttattcatagcacttgcatttgtatcatggttaacagtagctcgagttgtacgaggccaagtacaatcactatcaagttcggaatttatacaagcagccaaaacccttggtgcaacaaatcaaagaataatcttaaaacacttgatccctaatagcattggaatgatagttatattcacaacaataagggttccaagctttattatggctgaagcatttttatcctttttaggacttggaatttcagctccaatgacaagctggggagaattagtgcaaaatggaattgctacatttgttgaatatccatggaaagtttttattccagctatagttatgacaatatttctattatttatgaactttttaggtgatgggctaagggatgcttttgatccaaaagatagcatctaa

SEQ ID NO: 188 - DNA, 372 bp, Borrelia burgdorferi
cgagttgtacgaggccaagtacaatcactatcaagttcggaatttatacaagcagccaaaacccttggtgcaacaaatcaaagaataatcttaaaacacttgatccctaatagcattggaatgatagttatattcacaacaataagggttccaagctttattatggctgaagcatttttatcctttttaggacttggaatttcagctccaatgacaagctggggagaattagtgcaaaatggaattgctacatttgttgaatatccatggaaagtttttattccagctatagttatgacaatatttctattatttatgaactttttaggtgatgggctaagggatgcttttgatccaaaagatagcatctaa

SEQ ID NO: 189 - protein, 306 aa, Borrelia burgdorferi
MLKFTLKKILGIIPTLLVIIFLCFFVMRMAPGSPFDSEKPIDPQVKARLMEKYHLDKPFYIQAFYYITNALRGDLGPSLKKKDLTVSQYIKLGFPKSLTLGVISLIISLSIGIPIGILAAIYKNTYVDYIITSIAILGISIPLFVIGPILQYFFAIKWGLLYTSGWITERGGFSNLILPIITLSMPNVAIFARIIRGSMLEIIQSDFIRTARAKGLSFKKIVIKHMLRGAMLPVVSYIGPAFAAIISGSVVIEKIFRIAGMGMFITESALNRDYPVLMGGLLVYSIILLISILISDIIYKILDPRV

SEQ ID NO: 190 - protein, 274 aa, Borrelia burgdorferi
SPFDSEKPIDPQVKARLMEKYHLDKPFYIQAFYYITNALRGDLGPSLKKKDLTVSQYIKLGFPKSLTLGVISLIISLSIGIPIGILAAIYKNTYVDYIITSIAILGISIPLFVIGPILQYFFAIKWGLLYTSGWITERGGFSNLILPIITLSMPNVAIFARIIRGSMLEIIQSDFIRTARAKGLSFKKIVIKHMLRGAMLPVVSYIGPAFAAIISGSVVIEKIFRIAGMGMFITESALNRDYPVLMGGLLVYSIILLISILISDIIYKILDPRV

SEQ ID NO: 191 - DNA, 921 bp, Borrelia burgdorferi
atgttaaagtttactttaaagaaaatattaggaataataccaactttactggtaataatttttttatgcttttttgtaatgagaatggctcctggaagtccatttgattctgaaaaacctattgatcctcaagtaaaagcaagattgatggaaaaatatcaccttgacaagcctttttatattcaagctttttattacattacaaacgctctcaggggagatctgggaccttctttgaaaaagaaagaccttacagttagtcaatacataaaattaggatttccaaaatcacttacactaggagtaatatcccttattatatcactatcaataggaataccaataggtatattagctgccatttataaaaatacttatgtggattatataataacatcaatagcaatattggggatttcaataccattattcgtaatagggccaattttacaatatttttttgcaattaaatggggtttgctttatacctctggatggattacagaaagaggaggattttcaaatttaattctacccataataactcttagcatgcccaacgtagctattttcgcaagaataatcagaggatcaatgctagaaataatacaaagcgactttataagaactgcgcgtgcaaaagggctaagcttcaaaaagatagttataaagcatatgttaagaggagcaatgttgcctgtagtaagctatataggtccagcatttgctgctataatatctggaagcgtggttattgaaaaaatatttagaattgctggaatgggaatgtttataacagaatccgcactaaacagagattacccagtattaatgggcggattgttagtatattcaataatactgcttatttctatattaatatcagatattatatataaaatattagatccaagagtataa

SEQ ID NO: 192 - DNA, 825 bp, Borrelia burgdorferi
agtccatttgattctgaaaaacctattgatcctcaagtaaaagcaagattgatggaaaaatatcaccttgacaagcctttttatattcaagctttttattacattacaaacgctctcaggggagatctgggaccttctttgaaaaagaaagaccttacagttagtcaatacataaaattaggatttccaaaatcacttacactaggagtaatatcccttattatatcactatcaataggaataccaataggtatattagctgccatttataaaaatacttatgtggattatataataacatcaatagcaatattggggatttcaataccattattcgtaatagggccaattttacaatatttttttgcaattaaatggggtttgctttatacctctggatggattacagaaagaggaggattttcaaatttaattctacccataataactcttagcatgcccaacgtagctattttcgcaagaataatcagaggatcaatgctagaaataatacaaagcgactttataagaactgcgcgtgcaaaagggctaagcttcaaaaagatagttataaagcatatgttaagaggagcaatgttgcctgtagtaagctatataggtccagcatttgctgctataatatctggaagcgtggttattgaaaaaatatttagaattgctggaatgggaatgtttataacagaatccgcactaaacagagattacccagtattaatgggcggattgttagtatattcaataatactgcttatttctatattaatatcagatattatatataaaatattagatccaagagtataa

SEQ ID NO: 193 - protein, 523 aa, Borrelia burgdorferi
MKYIKIALMLIIFSLIACISNAKKEKIVFRVSNLSEPSSLDPQLSTDLYGSNIITNLFLGLAVKDSQTGKYKPGLAKSWNISEDGIIYTFNLREDIVWSDGVAITAEEIKKSYLRILNKKTAAMYANLIKSTIKNAQEYFDETVPESELGIKAIDSKTLEITLTSPKPYFPDMLTHSAYIPVPMHIVEKYGENWTNPENIVVSGAYKLKERSINDKIVIEKNEKYYNAKNVEIDEVIFYPTEGSVAYNMYINGELDFLQGAEKNNLEEIKIRDDYYSGLKNGMAYIAFNTTIKPLDNLKVRQAISLAIDRETLTKVVLKGSSDPTRNLTPKFDDYSYGKNLILFDPENAKKLLAEAGYPDGKGFPTLKYKISEGRPTTAEFLQEQFKKILNINLEIENEEWTTFLGSRRTGNYQMSSVGWIGDYFDPLTFLDSLFTTENHFLGAYKYSNKEYDALIKKSNFELDPIKRQDILRQAEEIIAEKDFPMAPLYIPKSHYLFRNDKWTGWVPNIAESYLYEDIKTKK

SEQ ID NO: 194 - protein, 506 aa, Borrelia burgdorferi
CISNAKKEKIVFRVSNLSEPSSLDPQLSTDLYGSNIITNLFLGLAVKDSQTGKYKPGLAKSWNISEDGIIYTFNLREDIVWSDGVAITAEEIKKSYLRILNKKTAAMYANLIKSTIKNAQEYFDETVPESELGIKAIDSKTLEITLTSPKPYFPDMLTHSAYIPVPMHIVEKYGENWTNPENIVVSGAYKLKERSINDKIVIEKNEKYYNAKNVEIDEVIFYPTEGSVAYNMYINGELDFLQGAEKNNLEEIKIRDDYYSGLKNGMAYIAFNTTIKPLDNLKVRQAISLAIDRETLTKVVLKGSSDPTRNLTPKFDDYSYGKNLILFDPENAKKLLAEAGYPDGKGFPTLKYKISEGRPTTAEFLQEQFKKILNINLEIENEEWTTFLGSRRTGNYQMSSVGWIGDYFDPLTFLDSLFTTENHFLGAYKYSNKEYDALIKKSNFELDPIKRQDILRQAEEIIAEKDFPMAPLYIPKSHYLFRNDKWTGWVPNIAESYLYEDIKTKK

SEQ ID NO: 195 - DNA, 1572 bp, Borrelia burgdorferi
atgaaatatataaaaatagccttaatgctaataattttttctttaatagcatgtattagtaatgctaaaaaagaaaaaatagttttcagagtatcaaacttaagcgagccatcatcacttgatcctcaactctcaacagacctttacggtagcaacattattacaaacctattcttaggcctagcggtaaaagattctcaaactggaaaatataaaccaggacttgcaaaaagttggaatatttctgaagatggaattatttacacatttaacctaagagaagatatagtttggagcgatggagttgccattactgccgaggagataaaaaaatcatacctaagaattttaaataaaaaaacagctgcaatgtatgctaatttaataaaatctacaataaaaaatgcacaagaatatttcgatgagacagtgcctgaatctgagcttggcataaaggctattgacagcaaaaccttagagataacattaacatctccaaagccttattttcctgatatgctaacacactcagcatacataccagttccaatgcatattgttgaaaaatatggagaaaattggacaaatcctgaaaatatagttgttagtggcgcatacaaacttaaagaaagatcaattaacgataaaatcgtaatagaaaaaaatgaaaaatactataatgcaaaaaatgtagaaattgatgaagtaatattttacccaacagaaggtagcgtggcttacaatatgtacataaacggtgaactcgattttctacaaggagcagaaaagaataatttagaagaaattaaaataagagatgattattattctgggttaaaaaacggaatggcatacatagcattcaatacaacaataaaaccactagacaatttaaaagttagacaagccatctcccttgccattgacagagaaactttaactaaagtagttttaaagggaagttcagatccaacaagaaatctaactccaaaatttgatgattattcttatggaaaaaatttaatactatttgatcctgagaatgcaaaaaaacttttagctgaagctggatatccggatgggaaaggattccccacattaaaatataaaatatcggagggaagaccaacaacagcagaatttttgcaagaacaatttaaaaaaatactaaacattaacttagaaatcgagaatgaagaatggacaacattcctaggaagcagaagaactggaaattaccaaatgtcaagcgtggggtggataggagattattttgatcccttaacattcttagacagcttatttacaacagaaaatcattttttaggagcgtacaaatattcaaacaaagagtatgatgctttaataaaaaaatctaattttgaacttgatccaataaaaagacaagacattttaagacaagctgaagagataatagcagaaaaagactttcctatggcacctttatatatacccaaatctcattatcttttcagaaatgataaatggacagggtgggtaccaaatatcgcagaaagctatttatatgaagatattaaaactaaaaaataa

SEQ ID NO: 196 - DNA, 1521 bp, Borrelia burgdorferi
tgtattagtaatgctaaaaaagaaaaaatagttttcagagtatcaaacttaagcgagccatcatcacttgatcctcaactctcaacagacctttacggtagcaacattattacaaacctattcttaggcctagcggtaaaagattctcaaactggaaaatataaaccaggacttgcaaaaagttggaatatttctgaagatggaattatttacacatttaacctaagagaagatatagtttggagcgatggagttgccattactgccgaggagataaaaaaatcatacctaagaattttaaataaaaaaacagctgcaatgtatgctaatttaataaaatctacaataaaaaatgcacaagaatatttcgatgagacagtgcctgaatctgagcttggcataaaggctattgacagcaaaaccttagagataacattaacatctccaaagccttattttcctgatatgctaacacactcagcatacataccagttccaatgcatattgttgaaaaatatggagaaaattggacaaatcctgaaaatatagttgttagtggcgcatacaaacttaaagaaagatcaattaacgataaaatcgtaatagaaaaaaatgaaaaatactataatgcaaaaaatgtagaaattgatgaagtaatattttacccaacagaaggtagcgtggcttacaatatgtacataaacggtgaactcgattttctacaaggagcagaaaagaataatttagaagaaattaaaataagagatgattattattctgggttaaaaaacggaatggcatacatagcattcaatacaacaataaaaccactagacaatttaaaagttagacaagccatctcccttgccattgacagagaaactttaactaaagtagttttaaagggaagttcagatccaacaagaaatctaactccaaaatttgatgattattcttatggaaaaaatttaatactatttgatcctgagaatgcaaaaaaacttttagctgaagctggatatccggatgggaaaggattccccacattaaaatataaaatatcggagggaagaccaacaacagcagaatttttgcaagaacaatttaaaaaaatactaaacattaacttagaaatcgagaatgaagaatggacaacattcctaggaagcagaagaactggaaattaccaaatgtcaagcgtggggtggataggagattattttgatcccttaacattcttagacagcttatttacaacagaaaatcattttttaggagcgtacaaatattcaaacaaagagtatgatgctttaataaaaaaatctaattttgaacttgatccaataaaaagacaagacattttaagacaagctgaagagataatagcagaaaaagactttcctatggcacctttatatatacccaaatctcattatcttttcagaaatgataaatggacagggtgggtaccaaatatcgcagaaagctatttatatgaagatattaaaactaaaaaataa

SEQ ID NO: 197 - protein, 369 aa, Borrelia burgdorferi
MKKIFLFLFISFYLFGFEDSSLKIGIDDVYVEAHEEGFHLFIRKKPAIKSVILTESFEIPDKKKDVATYSFRTLSYNKVNGDEIRILNGRVIKNKELLSLTSSTPVPNKKFGEAFHILIPKKLKYGFPNFSTRSGDIDLEVLKSKKEPFWFSIRSFEKKYNDYLGRYQDNAYELLFKDDQNQGKIEFNELKDTFTKFSDEVVIANNGIDIVDKINKILKNSEDSVYDLDLVLVVDVTDSMKSNIEILKEHLFSIIEPQLQKFKSYRIGLVFYKDYLEDFLTKAFDFNTIPYLNNILKYVNVGGGGDYPEAVFEGIDAAVTQFDWRAERRFIIVIGDAPPHEYPRGSIVYKDVINSAKEKDITIYGIIFQ

SEQ ID NO: 198 - protein, 353 aa, Borrelia burgdorferi
FEDSSLKIGIDDVYVEAHEEGFHLFIRKKPAIKSVILTESFEIPDKKKDVATYSFRTLSYNKVNGDEIRILNGRVIKNKELLSLTSSTPVPNKKFGEAFHILIPKKLKYGFPNFSTRSGDIDLEVLKSKKEPFWFSIRSFEKKYNDYLGRYQDNAYELLFKDDQNQGKIEFNELKDTFTKFSDEVVIANNGIDIVDKINKILKNSEDSVYDLDLVLVVDVTDSMKSNIEILKEHLFSIIEPQLQKFKSYRIGLVFYKDYLEDFLTKAFDFNTIPYLNNILKYVNVGGGGDYPEAVFEGIDAAVTQFDWRAERRFIIVIGDAPPHEYPRGSIVYKDVINSAKEKDITIYGIIFQ

SEQ ID NO: 199 - DNA, 1110 bp, Borrelia burgdorferi
atgaagaaaatttttttatttctttttattagtttttatttgtttggatttgaagatagttctttgaaaataggtattgatgatgtttatgttgaggctcatgaagagggatttcatctttttattagaaaaaaacctgcaatcaaatcagtaatattgacagagtcttttgaaattcctgataagaaaaaagatgtggctacttattcatttcgtacattaagttataataaggttaatggagatgaaattcggattttaaatggaagagttattaagaataaagaacttttatcattgacatcttccacccctgttcctaataaaaagtttggagaagcttttcatatattgattccaaaaaaattaaaatatggatttccaaatttttcaacaagaagtggtgatattgacttagaagtattaaaaagtaaaaaagagcccttttggttttctataagatcttttgagaaaaaatataatgattatttgggcagatatcaagacaatgcttatgaattgcttttcaaggatgatcaaaatcagggaaaaattgaatttaatgaattaaaagatacttttacaaaattttcagatgaggttgttattgctaataatggcattgatattgttgataaaataaacaaaattttaaaaaactcagaagattcagtttatgatttagatttagtgcttgttgttgatgttactgatagtatgaaaagcaatattgagattctaaaagagcatttgttttcaataatagaacctcaacttcaaaagtttaaatcctacagaataggtcttgttttttataaagactatcttgaagattttttaaccaaagcttttgattttaatactattccttatttaaataatattcttaagtatgttaatgttggtggcggtggggattatccagaagctgtttttgaggggattgatgctgctgtgacccaatttgattggcgggcagaaagaaggtttattattgttataggagatgcacctcctcatgagtatccaagagggtctattgtttataaagatgttatcaattctgcaaaggaaaaagatattacaatttatggaataatatttcagtaa

SEQ ID NO: 200 - DNA, 1062 bp, Borrelia burgdorferi
tttgaagatagttctttgaaaataggtattgatgatgtttatgttgaggctcatgaagagggatttcatctttttattagaaaaaaacctgcaatcaaatcagtaatattgacagagtcttttgaaattcctgataagaaaaaagatgtggctacttattcatttcgtacattaagttataataaggttaatggagatgaaattcggattttaaatggaagagttattaagaataaagaacttttatcattgacatcttccacccctgttcctaataaaaagtttggagaagcttttcatatattgattccaaaaaaattaaaatatggatttccaaatttttcaacaagaagtggtgatattgacttagaagtattaaaaagtaaaaaagagcccttttggttttctataagatcttttgagaaaaaatataatgattatttgggcagatatcaagacaatgcttatgaattgcttttcaaggatgatcaaaatcagggaaaaattgaatttaatgaattaaaagatacttttacaaaattttcagatgaggttgttattgctaataatggcattgatattgttgataaaataaacaaaattttaaaaaactcagaagattcagtttatgatttagatttagtgcttgttgttgatgttactgatagtatgaaaagcaatattgagattctaaaagagcatttgttttcaataatagaacctcaacttcaaaagtttaaatcctacagaataggtcttgttttttataaagactatcttgaagattttttaaccaaagcttttgattttaatactattccttatttaaataatattcttaagtatgttaatgttggtggcggtggggattatccagaagctgtttttgaggggattgatgctgctgtgacccaatttgattggcgggcagaaagaaggtttattattgttataggagatgcacctcctcatgagtatccaagagggtctattgtttataaagatgttatcaattctgcaaaggaaaaagatattacaatttatggaataatatttcagtaa

SEQ ID NO: 201 - protein, 310 aa, Borrelia burgdorferi
MIFFRNSFMALIFSFSILSISYFFGDFFQFSYIKMISWRFILFLIMATGIATCAKSNSLNLGNEGQIYFGAFLVYIFSSFFGLTYFNFVFLILLSSFFVGLLGLIPFFITFFFGLNKALTGLLISYGNQRLVDGFILNMLKTGSFSNQTKRINSLFALDSSLIYLFLLGVSVWLFYVFIHKKTIYGLQLEILSNKKKIDIFFNINEFKYKFFAVFGSAFLNGLAGSMFVVFFRPYLVLGLTSGLGWSSLIVAVISGFNYVYVLFFSLLFSILIEFNNFLNINYDFKYEFIGLCQSIAIFISLFLIKARKK

SEQ ID NO: 202 - protein, 257 aa, Borrelia burgdorferi
AKSNSLNLGNEGQIYFGAFLVYIFSSFFGLTYFNFVFLILLSSFFVGLLGLIPFFITFFFGLNKALTGLLISYGNQRLVDGFILNMLKTGSFSNQTKRINSLFALDSSLIYLFLLGVSVWLFYVFIHKKTIYGLQLEILSNKKKIDIFFNINEFKYKFFAVFGSAFLNGLAGSMFVVFFRPYLVLGLTSGLGWSSLIVAVISGFNYVYVLFFSLLFSILIEFNNFLNINYDFKYEFIGLCQSIAIFISLFLIKARKK

SEQ ID NO: 203 - DNA, 933 bp, Borrelia burgdorferi
atgatcttttttagaaatagctttatggcattaattttttctttttcaatattaagtattagctattttttcggtgatttttttcaattttcttatattaaaatgatatcttggcgctttattttatttttaattatggctacggggattgctacttgtgccaagagtaattcattaaatcttgggaatgaaggtcagatttattttggggcatttttagtttatatattttcaagtttttttggattaacctattttaattttgtatttttgatacttttaagttctttttttgtaggacttttggggcttatccccttttttattacttttttcttcggattaaataaagccttaacaggtcttttaatatcttatggaaatcaaagattggtggatggatttattttaaatatgttaaaaacaggtagtttttctaatcagacaaaaaggattaatagtttgtttgctttagattcatcacttatttacttgtttttgcttggtgtatcagtttggcttttttatgtttttattcacaaaaaaactatttatggtcttcagcttgaaatattaagcaataaaaaaaagatagacatttttttcaatataaatgaatttaaatataagtttttcgctgtatttggcagtgcttttttaaatggtcttgcaggttctatgtttgtagtgttttttagaccatatttggttttagggctaacttcaggacttggttggagtagtctaattgttgctgtaatttcaggatttaattatgtttatgtattattttttagcttattgttttcaatattaattgaatttaataattttcttaatataaattatgactttaagtatgaatttattgggctttgtcaatcaattgctatttttatctctttatttttgattaaagctaggaaaaagtag

SEQ ID NO: 204 - DNA, 774 bp, Borrelia burgdorferi
gccaagagtaattcattaaatcttgggaatgaaggtcagatttattttggggcatttttagtttatatattttcaagtttttttggattaacctattttaattttgtatttttgatacttttaagttctttttttgtaggacttttggggcttatccccttttttattacttttttcttcggattaaataaagccttaacaggtcttttaatatcttatggaaatcaaagattggtggatggatttattttaaatatgttaaaaacaggtagtttttctaatcagacaaaaaggattaatagtttgtttgctttagattcatcacttatttacttgtttttgcttggtgtatcagtttggcttttttatgtttttattcacaaaaaaactatttatggtcttcagcttgaaatattaagcaataaaaaaaagatagacatttttttcaatataaatgaatttaaatataagtttttcgctgtatttggcagtgcttttttaaatggtcttgcaggttctatgtttgtagtgttttttagaccatatttggttttagggctaacttcaggacttggttggagtagtctaattgttgctgtaatttcaggatttaattatgtttatgtattattttttagcttattgttttcaatattaattgaatttaataattttcttaatataaattatgactttaagtatgaatttattgggctttgtcaatcaattgctatttttatctctttatttttgattaaagctaggaaaaagtag

SEQ ID NO: 205 - protein, 364 aa, Borrelia burgdorferi
MVVEINSLRTCYLLVLLLLVAYGLVVFYTSSFFLSLELTGNPNFLFFTRLNYLFLSFMVFLVFERISLNFLKKSIFPVLIITLFLIMATFLSPSISGAKRWIFFQGVSIQPSEIFKISFTIYLSAYLSKFDPRKNNGISYWIKPMLIFAIFWVLIILQNDYSTAIYFAILFFIVLFVSNMAFSYVFAIVVTFLPVSAIFLMLEPYRVSRIFAFLNPYDDPSGKGYQIIASLNALKSGGILGKGLGMGEVKLGKLPEANSDFIFSVLGEELGFLGVLFAISLFFLFFYFGYFIAIHSNSRFKFFIAFISSLAIFLQSMMNILIAIGLLPPTGINLPFFSSGGSSIIVTMALSGLISNVSKNLSNN

SEQ ID NO: 206 - protein, 300 aa, Borrelia burgdorferi
RISLNFLKKSIFPVLIITLFLIMATFLSPSISGAKRWIFFQGVSIQPSEIFKISFTIYLSAYLSKFDPRKNNGISYWIKPMLIFAIFWVLIILQNDYSTAIYFAILFFIVLFVSNMAFSYVFAIVVTFLPVSAIFLMLEPYRVSRIFAFLNPYDDPSGKGYQIIASLNALKSGGILGKGLGMGEVKLGKLPEANSDFIFSVLGEELGFLGVLFAISLFFLFFYFGYFIAIHSNSRFKFFIAFISSLAIFLQSMMNILIAIGLLPPTGINLPFFSSGGSSIIVTMALSGLISNVSKNLSNN

SEQ ID NO: 207 - DNA, 1095 bp, Borrelia burgdorferi
atggttgtagagataaattcacttaggacatgttatttgcttgttttgctgctattggtagcctatggccttgtagttttttatacttcttccttttttctaagcttagaattgacaggtaatccaaattttttatttttcacaagacttaattatctttttttaagttttatggtttttcttgtttttgaaaggatttctttaaattttttaaaaaaatcaatatttcctgtattgattataactctttttttaattatggcaacttttttatctccaagtatttctggagcaaagagatggatattctttcaaggtgttagcattcaaccttctgagatttttaaaatatcttttactatttatctttcagcttatttgagcaagtttgacccaagaaaaaacaatggtatttcatactggataaagccaatgttgatttttgcaattttttgggtgttaataattttgcaaaacgattattcaacagctatttattttgccattcttttttttattgttttgtttgtttctaatatggcatttagctatgtttttgctattgtggttacttttttaccagtttctgctatattcttgatgcttgaaccttatagggtttctagaatttttgcctttctcaatccttacgatgatccttctggcaaaggttaccagataatagcatctcttaatgctttaaaaagtggaggaattttaggtaaagggctgggaatgggagaggtaaaacttggaaaattaccagaggccaattcggattttattttttcagttcttggagaagaattaggatttttaggggttttgtttgctataagcttgttttttttgtttttttactttggttattttatagctattcattctaatagtaggtttaaattttttattgcatttatttcaagtcttgcaatttttcttcaaagcatgatgaatattttaattgcaatcggtcttttgcctcctacagggataaatttaccatttttttcatctgggggatcttctattattgttaccatggcattgtctggccttatttcaaatgtttcaaaaaatttaagtaataattga

SEQ ID NO: 208 - DNA, 903 bp, Borrelia burgdorferi
aggatttctttaaattttttaaaaaaatcaatatttcctgtattgattataactctttttttaattatggcaacttttttatctccaagtatttctggagcaaagagatggatattctttcaaggtgttagcattcaaccttctgagatttttaaaatatcttttactatttatctttcagcttatttgagcaagtttgacccaagaaaaaacaatggtatttcatactggataaagccaatgttgatttttgcaattttttgggtgttaataattttgcaaaacgattattcaacagctatttattttgccattcttttttttattgttttgtttgtttctaatatggcatttagctatgtttttgctattgtggttacttttttaccagtttctgctatattcttgatgcttgaaccttatagggtttctagaatttttgcctttctcaatccttacgatgatccttctggcaaaggttaccagataatagcatctcttaatgctttaaaaagtggaggaattttaggtaaagggctgggaatgggagaggtaaaacttggaaaattaccagaggccaattcggattttattttttcagttcttggagaagaattaggatttttaggggttttgtttgctataagcttgttttttttgtttttttactttggttattttatagctattcattctaatagtaggtttaaattttttattgcatttatttcaagtcttgcaatttttcttcaaagcatgatgaatattttaattgcaatcggtcttttgcctcctacagggataaatttaccatttttttcatctgggggatcttctattattgttaccatggcattgtctggccttatttcaaatgtttcaaaaaatttaagtaataattga

SEQ ID NO: 209 - protein, 207 aa, Borrelia burgdorferi
MKVNNFLSFFFRAFFLLFLIVILFFFVLFFIDFIGMYNTKRYFPEFVRTKLLGETSLVFDHNSNIILDEARLVKEREAIDIKNQQIEKLKEDLKLKEDSLNKLEFELKQKQKDLDLKQKIIDDIINKYNDEEANILQTAVYLMNMPPEDAVKRLEDLNPELAISYMRKIEELSKKEGRLSIVPYWLSLMDSKKAAILIRKMSVSSLE

SEQ ID NO: 210 - protein, 177 aa, Borrelia burgdorferi
IDFIGMYNTKRYFPEFVRTKLLGETSLVFDHNSNIILDEARLVKEREAIDIKNQQIEKLKEDLKLKEDSLNKLEFELKQKQKDLDLKQKIIDDIINKYNDEEANILQTAVYLMNMPPEDAVKRLEDLNPELAISYMRKIEELSKKEGRLSIVPYWLSLMDSKKAAILIRKMSVSSLE

SEQ ID NO: 211 - DNA, 624 bp, Borrelia burgdorferi
atgaaagtgaataattttttatcgttcttttttagggcattttttttgttatttttaattgttattttatttttctttgtattattctttattgattttattggaatgtataatactaaaagatatttccccgaatttgtaagaaccaagttgttaggagaaacttctctggtctttgatcataattctaatataattcttgatgaagctagacttgtgaaggaaagagaagctattgatattaagaatcagcagattgaaaagcttaaagaagatctaaagttaaaagaagacagtttaaataagcttgaatttgagcttaagcaaaagcagaaagatttagatttaaaacaaaaaataatagatgacattataaataaatataatgatgaggaagcaaatattttgcaaacagctgtatatttaatgaatatgccaccagaagatgctgttaagcggcttgaagatttaaatcccgagcttgcaatatcttatatgcggaaaattgaagagctttccaaaaaagaaggtcgtttatcaattgttccttattggttatctcttatggattctaaaaaagctgctatattgattagaaaaatgtctgttagttcattggagtag

SEQ ID NO: 212 - DNA, 534 bp, Borrelia burgdorferi
attgattttattggaatgtataatactaaaagatatttccccgaatttgtaagaaccaagttgttaggagaaacttctctggtctttgatcataattctaatataattcttgatgaagctagacttgtgaaggaaagagaagctattgatattaagaatcagcagattgaaaagcttaaagaagatctaaagttaaaagaagacagtttaaataagcttgaatttgagcttaagcaaaagcagaaagatttagatttaaaacaaaaaataatagatgacattataaataaatataatgatgaggaagcaaatattttgcaaacagctgtatatttaatgaatatgccaccagaagatgctgttaagcggcttgaagatttaaatcccgagcttgcaatatcttatatgcggaaaattgaagagctttccaaaaaagaaggtcgtttatcaattgttccttattggttatctcttatggattctaaaaaagctgctatattgattagaaaaatgtctgttagttcattggagtag

SEQ ID NO: 213 - protein, 242 aa, Borrelia burgdorferi
MLTYGDMVTLLLVFFVTMFSLNDIIFQENVIRIMSASFTGAGFFKGGKTLDFSKLSYLSNSFMSLPSTVRNKQASQTAKNKSMIEFIEKIQSKNIVVRQEERGIVISLAADAFFDSASADVKLEENRDSIQKIASFIGFLSPRGYNFKIEGHTDNIDTDVNGPWKSNWELSAARSVNMLEHILNYLDQSDVKRIENNFEVSGFGGSRPIATDDTPEGRAYNRRIDILITTDASLSFPKEIKQ

SEQ ID NO: 214 - protein, 221 aa, Borrelia burgdorferi
NDIIFQENVIRIMSASFTGAGFFKGGKTLDFSKLSYLSNSFMSLPSTVRNKQASQTAKNKSMIEFIEKIQSKNIVVRQEERGIVISLAADAFFDSASADVKLEENRDSIQKIASFIGFLSPRGYNFKIEGHTDNIDTDVNGPWKSNWELSAARSVNMLEHILNYLDQSDVKRIENNFEVSGFGGSRPIATDDTPEGRAYNRRIDILITTDASLSFPKEIKQ

SEQ ID NO: 215 - DNA, 729 bp, Borrelia burgdorferi
atgttgacttatggagacatggttactttgctgcttgtgttttttgttacaatgttttcattaaatgatattatttttcaagaaaatgtgataagaataatgtctgcttctttcacgggtgctggatttttcaagggcggtaaaactttagattttagtaaattatcttatttgagtaatagctttatgtctttgccttctactgtgcgcaataaacaagcatctcagactgctaaaaataaatccatgattgaatttattgagaagattcagtctaaaaatattgtagttaggcaagaagaaagaggtattgtaatatctcttgcagcagatgcattttttgattctgctagtgcagatgttaagcttgaagagaatagagattctattcaaaaaatagcatcttttattggctttttaagtcctagaggctataattttaaaatagaagggcatacagataatattgatactgatgtaaatggaccttggaaaagcaattgggaactttcggctgctagatctgttaatatgctggaacatattttgaactatttagatcaatctgatgttaaaagaattgaaaataattttgaagtatctggttttggtggaagtaggcctattgcaacagacgatacccctgagggtagggcttataatagaagaattgatatattaattactacagatgcatctttaagtttccctaaggaaattaagcagtaa

SEQ ID NO: 216 - DNA, 666 bp, Borrelia burgdorferi
aatgatattatttttcaagaaaatgtgataagaataatgtctgcttctttcacgggtgctggatttttcaagggcggtaaaactttagattttagtaaattatcttatttgagtaatagctttatgtctttgccttctactgtgcgcaataaacaagcatctcagactgctaaaaataaatccatgattgaatttattgagaagattcagtctaaaaatattgtagttaggcaagaagaaagaggtattgtaatatctcttgcagcagatgcattttttgattctgctagtgcagatgttaagcttgaagagaatagagattctattcaaaaaatagcatcttttattggctttttaagtcctagaggctataattttaaaatagaagggcatacagataatattgatactgatgtaaatggaccttggaaaagcaattgggaactttcggctgctagatctgttaatatgctggaacatattttgaactatttagatcaatctgatgttaaaagaattgaaaataattttgaagtatctggttttggtggaagtaggcctattgcaacagacgatacccctgagggtagggcttataatagaagaattgatatattaattactacagatgcatctttaagtttccctaaggaaattaagcagtaa

SEQ ID NO: 217 - protein, 285 aa, Borrelia burgdorferi
MRMSVYTMGFAYIRSIMGYVVLFFFASLAVNFFVNIIQVGFFITFKSLEPRWDKISFNFSRWAKNSFFSAGAFFNLFKSLLKVVIICLIYYFIIENNIGKISKLSEYTLQSGISIVLVIAYKICFFSVMFLAIVGVFDYLFQRSQYIESLKMTKEEVKQERKEMEGDPLLRSRIKERMRVILSTNLRVAIPQADVVITNPEHFAVAIKWDSETMLAPKVLAKGQDEIALTIKKIARENNVPLMENKLLARALYANVKVNEEIPREYWEIVSKILVRVYSITKKFN

SEQ ID NO: 218 - protein, 253 aa, Borrelia burgdorferi
FVNIIQVGFFITFKSLEPRWDKISFNFSRWAKNSFFSAGAFFNLFKSLLKVVIICLIYYFIIENNIGKISKLSEYTLQSGISIVLVIAYKICFFSVMFLAIVGVFDYLFQRSQYIESLKMTKEEVKQERKEMEGDPLLRSRIKERMRVILSTNLRVAIPQADVVITNPEHFAVAIKWDSETMLAPKVLAKGQDEIALTIKKIARENNVPLMENKLLARALYANVKVNEEIPREYWEIVSKILVRVYSITKKFN

SEQ ID NO: 219 - DNA, 858 bp, Borrelia burgdorferi
atgcgtatgagtgtttatactatgggttttgcatatattagatctatcatggggtatgtcgttttgttttttttcgcatctttagctgttaatttttttgttaatattattcaagtaggcttttttattacttttaaatctttggagccaaggtgggataaaattagttttaatttttccagatgggcaaaaaattcttttttttcagcaggggcttttttcaatttgtttaaaagtttgttaaaagttgttataatatgcttgatatattattttattatagaaaacaatataggcaaaatttctaagctttcggagtatacacttcaatctggaatttctattgtgttagtgattgcctataagatatgttttttttcagtaatgtttttggcaattgtaggggtgtttgattatttgtttcaaagatctcagtacattgagagtttgaaaatgacaaaagaagaggtaaagcaggaaagaaaggaaatggaaggtgatcctttacttcgatctagaataaaagagagaatgagggttattttaagtaccaatttaagagtagctattcctcaagcagatgtagtaattacaaatccagaacattttgcagttgctattaaatgggatagcgaaacaatgttagctccaaaggtgcttgcaaaaggtcaagatgaaatagctctcacaattaaaaaaattgcaagagaaaataatgttcctttaatggaaaataagctccttgcaagagctctttatgctaatgttaaggttaatgaagagattccaagagaatattgggagattgtttcaaaaattcttgtgagagtatattctattactaaaaagtttaattag

SEQ ID NO: 220 - DNA, 762 bp, Borrelia burgdorferi
tttgttaatattattcaagtaggcttttttattacttttaaatctttggagccaaggtgggataaaattagttttaatttttccagatgggcaaaaaattcttttttttcagcaggggcttttttcaatttgtttaaaagtttgttaaaagttgttataatatgcttgatatattattttattatagaaaacaatataggcaaaatttctaagctttcggagtatacacttcaatctggaatttctattgtgttagtgattgcctataagatatgttttttttcagtaatgtttttggcaattgtaggggtgtttgattatttgtttcaaagatctcagtacattgagagtttgaaaatgacaaaagaagaggtaaagcaggaaagaaaggaaatggaaggtgatcctttacttcgatctagaataaaagagagaatgagggttattttaagtaccaatttaagagtagctattcctcaagcagatgtagtaattacaaatccagaacattttgcagttgctattaaatgggatagcgaaacaatgttagctccaaaggtgcttgcaaaaggtcaagatgaaatagctctcacaattaaaaaaattgcaagagaaaataatgttcctttaatggaaaataagctccttgcaagagctctttatgctaatgttaaggttaatgaagagattccaagagaatattgggagattgtttcaaaaattcttgtgagagtatattctattactaaaaagtttaattag

SEQ ID NO: 221 - protein, 155 aa, Borrelia burgdorferi
MFTLSFVLINFIITGILILMLEFNFLKVDFKGNILLAGIFMGLMQGLGALPGISRSGITIFSASVIGFNRKSAFEISFLSLIPIVFGAILLKHKEFYDIFMVLNFFEINLGALVAFVVGIFSINFFFKMLNNKKLYYFSIYLFALSIIVCYFVRI

SEQ ID NO: 222 - protein, 143 aa, Borrelia burgdorferi
ITGILILMLEFNFLKVDFKGNILLAGIFMGLMQGLGALPGISRSGITIFSASVIGFNRKSAFEISFLSLIPIVFGAILLKHKEFYDIFMVLNFFEINLGALVAFVVGIFSINFFFKMLNNKKLYYFSIYLFALSIIVCYFVRI

SEQ ID NO: 223 - DNA, 468 bp, Borrelia burgdorferi
atgtttacattgtctttcgttttaattaattttattataacagggattttaatcttgatgctagaatttaattttttaaaagttgattttaaaggtaatattttgttagcaggaatttttatggggctgatgcaaggcttgggtgcgcttccaggaatctctcgttcaggaattacgatcttttcggcatcggttattggatttaatagaaaaagtgcatttgaaatttcatttttatctttaattccaatagtttttggagcgattttattaaaacataaagaattttatgatatttttatggttttaaatttttttgaaataaacttaggagcattagttgcttttgttgttggtattttctcaataaatttcttttttaaaatgcttaataacaaaaaactgtattatttttctatatatttatttgcactttcaattatagtttgttattttgttagaatatga

SEQ ID NO: 224 - DNA, 432 bp, Borrelia burgdorferi
ataacagggattttaatcttgatgctagaatttaattttttaaaagttgattttaaaggtaatattttgttagcaggaatttttatggggctgatgcaaggcttgggtgcgcttccaggaatctctcgttcaggaattacgatcttttcggcatcggttattggatttaatagaaaaagtgcatttgaaatttcatttttatctttaattccaatagtttttggagcgattttattaaaacataaagaattttatgatatttttatggttttaaatttttttgaaataaacttaggagcattagttgcttttgttgttggtattttctcaataaatttcttttttaaaatgcttaataacaaaaaactgtattatttttctatatatttatttgcactttcaattatagtttgttattttgttagaatatga

SEQ ID NO: 225 - protein, 507 aa, Borrelia burgdorferi
MIVLLISIGCANAVHIINEIFKLIKKEQLSKESIKATIKKLKTPILLTSFTTAFGFLSLTTSSINAYKTMGIFMSIGVIISMIISLTVLPGIITLIPFAKKKSFEKEKENKLNKISFLERLAKLNTQITKSILKRKYTSSIMVLIILGISFVGLLKIEINFDEKDYFKESTSVKKTLNLMQKEMGGISIFKIEIEGRPGEFKNAKAMQILDLITDKLDAFSAKTQSSSINGILKFTNFKIKKESPLEYKLPENKIILNKLINLIDKSDWTKDNKRMYINDDWSLISIIVRIEDNSTEGIKKFEKYAINTINEYMKNNKYHFSGVYDKVLIAKTMVKEQVINIITTLGSITLLLMFFFKSIKTGIIIAIPVAWSVFLNFAVMRLFGITLNPATATIASVSMGVGVDYSIHFFNTFILQYQKNQIYKTALLESIPNVFNGIFANSISVGIGFLTLTFSSYKIISTLGAIIAFTMLTTSLASLTLLPLLIYLFKPRVKLASNNNFKKLKQ

SEQ ID NO: 226 - protein, 441 aa, Borrelia burgdorferi
YKTMGIFMSIGVIISMIISLTVLPGIITLIPFAKKKSFEKEKENKLNKISFLERLAKLNTQITKSILKRKYTSSIMVLIILGISFVGLLKIEINFDEKDYFKESTSVKKTLNLMQKEMGGISIFKIEIEGRPGEFKNAKAMQILDLITDKLDAFSAKTQSSSINGILKFTNFKIKKESPLEYKLPENKIILNKLINLIDKSDWTKDNKRMYINDDWSLISIIVRIEDNSTEGIKKFEKYAINTINEYMKNNKYHFSGVYDKVLIAKTMVKEQVINIITTLGSITLLLMFFFKSIKTGIIIAIPVAWSVFLNFAVMRLFGITLNPATATIASVSMGVGVDYSIHFFNTFILQYQKNQIYKTALLESIPNVFNGIFANSISVGIGFLTLTFSSYKIISTLGAIIAFTMLTTSLASLTLLPLLIYLFKPRVKLASNNNFKKLKQ

SEQ ID NO: 227 - DNA, 1524 bp, Borrelia burgdorferi
atgattgttttacttatttcaatcggatgcgccaatgctgtacatataataaatgaaatatttaaattaataaaaaaagaacagctctcaaaagaatccataaaagcaacaattaaaaaacttaaaacacccatcctgctaacatcttttacaactgcatttggatttttatctcttacaacctcttcaattaatgcctacaaaacaatgggtattttcatgtcaattggagtaattatctcaatgataatctcattaaccgttttacctggaataataacattaatcccatttgcaaaaaaaaagtcttttgaaaaagaaaaagaaaataaactaaataaaatatccttccttgaaagacttgccaaactaaatacgcaaataacaaaatctatattaaaaagaaaatatacatcctctataatggtcctcatcatactgggaatttcttttgtaggtcttttaaaaatcgaaatcaattttgatgaaaaagattactttaaagaaagcacaagtgtaaaaaaaacattaaacctaatgcaaaaagaaatggggggaatatcgattttcaaaatagaaattgaaggcaggcccggtgaatttaaaaatgctaaagcaatgcaaatattagacttaattacagataagcttgatgcattttctgcaaaaactcaatctagttctattaatggcattttaaaatttacaaattttaaaattaaaaaagaatccccactagagtataaactgcctgaaaataaaattatactaaacaaactaataaatttgatagataaaagcgattggactaaggacaataaaagaatgtacattaacgatgactggtcattaatatctatcatagtaagaattgaagacaactcaaccgaaggaataaaaaaatttgaaaaatatgctattaacacaattaatgaatatatgaaaaataataaatatcatttctcaggtgtttatgataaggtattaatagctaaaacaatggtaaaagaacaggttataaacattataacaactcttggatcaataacactactacttatgtttttctttaaatctataaaaaccggaataattattgcaatcccagtagcatggtcagtgtttttaaactttgctgtaatgagattatttgggataaccttaaaccccgcaacggcaacaattgcatctgtaagcatgggagtaggagtagattattcaattcattttttcaatacatttattttacaataccaaaaaaatcaaatctacaaaactgcacttcttgaatcaatacccaatgtatttaatggaatatttgcaaattctatttctgttggaataggatttttaactctaacattttcgtcttataaaataatatcaactcttggagcaataattgcttttacaatgctaacgacatctcttgcatcactaactcttcttccattattaatttatttatttaaacctagagtaaagctagcctcaaacaacaattttaaaaaattaaaacaataa

SEQ ID NO: 228 - DNA, 1326 bp, Borrelia burgdorferi
tacaaaacaatgggtattttcatgtcaattggagtaattatctcaatgataatctcattaaccgttttacctggaataataacattaatcccatttgcaaaaaaaaagtcttttgaaaaagaaaaagaaaataaactaaataaaatatccttccttgaaagacttgccaaactaaatacgcaaataacaaaatctatattaaaaagaaaatatacatcctctataatggtcctcatcatactgggaatttcttttgtaggtcttttaaaaatcgaaatcaattttgatgaaaaagattactttaaagaaagcacaagtgtaaaaaaaacattaaacctaatgcaaaaagaaatggggggaatatcgattttcaaaatagaaattgaaggcaggcccggtgaatttaaaaatgctaaagcaatgcaaatattagacttaattacagataagcttgatgcattttctgcaaaaactcaatctagttctattaatggcattttaaaatttacaaattttaaaattaaaaaagaatccccactagagtataaactgcctgaaaataaaattatactaaacaaactaataaatttgatagataaaagcgattggactaaggacaataaaagaatgtacattaacgatgactggtcattaatatctatcatagtaagaattgaagacaactcaaccgaaggaataaaaaaatttgaaaaatatgctattaacacaattaatgaatatatgaaaaataataaatatcatttctcaggtgtttatgataaggtattaatagctaaaacaatggtaaaagaacaggttataaacattataacaactcttggatcaataacactactacttatgtttttctttaaatctataaaaaccggaataattattgcaatcccagtagcatggtcagtgtttttaaactttgctgtaatgagattatttgggataaccttaaaccccgcaacggcaacaattgcatctgtaagcatgggagtaggagtagattattcaattcattttttcaatacatttattttacaataccaaaaaaatcaaatctacaaaactgcacttcttgaatcaatacccaatgtatttaatggaatatttgcaaattctatttctgttggaataggatttttaactctaacattttcgtcttataaaataatatcaactcttggagcaataattgcttttacaatgctaacgacatctcttgcatcactaactcttcttccattattaatttatttatttaaacctagagtaaagctagcctcaaacaacaattttaaaaaattaaaacaataa

SEQ ID NO: 229 - protein, 254 aa, Borrelia burgdorferi
MNYTKFQEFISEFLGTFILLALGTGSVAMTVLFSSSPEIPGEIIKGGYTNIVFGWGLGVTFGIYTAARMSGAHLNPAVSIGLASVGKFPVSKLLHYIVAQILGAFTGALMTLVVFYPKWIEMDPGLENTQGIMATFPAVPGFLPGFIDQIFGTFLLMFLISVVGDFTKKHSDNPFIPFIVGAVVLSIGISFGGMNGYAINPARDLGPRILLLFAGFKNHGFNNLSIVIVPIIGPIIGAILGATIYEFTLKNNKD

SEQ ID NO: 230 - protein, 214 aa, Borrelia burgdorferi
GEIIKGGYTNIVFGWGLGVTFGIYTAARMSGAHLNPAVSIGLASVGKFPVSKLLHYIVAQILGAFTGALMTLVVFYPKWIEMDPGLENTQGIMATFPAVPGFLPGFIDQIFGTFLLMFLISVVGDFTKKHSDNPFIPFIVGAVVLSIGISFGGMNGYAINPARDLGPRILLLFAGFKNHGFNNLSIVIVPIIGPIIGAILGATIYEFTLKNNKD

SEQ ID NO: 231 - DNA, 765 bp, Borrelia burgdorferi
atgaattatacaaaattccaagaatttatatcggaatttttgggaacatttatcctattggctctaggaactggatctgttgcaatgacagtattattttcctcaagtcccgaaataccaggagaaataataaaaggaggatatacaaatatagtatttggatggggattgggtgtaacgtttggtatttacacagcagcaagaatgagcggagcacacctaaacccagctgttagcataggattagcaagtgttggaaagtttcccgtttcaaaacttttacattacattgtagcacaaatattaggagcttttacaggtgcattaatgacacttgtcgtattttatcctaaatggatagaaatggatcctggcttagaaaatactcaaggaataatggcaactttccctgctgttcctggatttttgcctggatttattgatcaaatttttggaacttttttgctaatgtttttaatttctgttgttggagattttacaaaaaaacacagcgacaatccatttattccttttattgtaggagcagtggttttatcaatagggataagtttcggaggaatgaacggttatgctattaatcctgcaagggatctgggaccaagaattttactcttatttgctggatttaaaaatcacggatttaacaatctaagtatagttattgtaccaataattggcccaataattggagcaattttgggagctacaatttacgaatttacactaaaaaataacaaagactaa

SEQ ID NO: 232 - DNA, 645 bp, Borrelia burgdorferi
ggagaaataataaaaggaggatatacaaatatagtatttggatggggattgggtgtaacgtttggtatttacacagcagcaagaatgagcggagcacacctaaacccagctgttagcataggattagcaagtgttggaaagtttcccgtttcaaaacttttacattacattgtagcacaaatattaggagcttttacaggtgcattaatgacacttgtcgtattttatcctaaatggatagaaatggatcctggcttagaaaatactcaaggaataatggcaactttccctgctgttcctggatttttgcctggatttattgatcaaatttttggaacttttttgctaatgtttttaatttctgttgttggagattttacaaaaaaacacagcgacaatccatttattccttttattgtaggagcagtggttttatcaatagggataagtttcggaggaatgaacggttatgctattaatcctgcaagggatctgggaccaagaattttactcttatttgctggatttaaaaatcacggatttaacaatctaagtatagttattgtaccaataattggcccaataattggagcaattttgggagctacaatttacgaatttacactaaaaaataacaaagactaa

SEQ ID NO: 233 - protein, 256 aa, Borrelia burgdorferi
MRRLFLLYILCSFVFLNLFAQGSSSYIDKQKELAIFYYEVGQRYINVGKIKKGKLFQAKALKIYPDLKKGFDIKLAVKELDARIKDDNPKVVMLEDIKLEEIPGIVHEKIEINDFTNAPKIEYIAQRERSKNQDKIIKFQFGKFARALISRNFDLFDSVIADKVNVMGQFESKNDFISTLSSASSKADADELEYLSVDDYYDLKSLKISKSNDTSFAVNVNAKKNDVTKNFPFWKERQTLIFTTEDDNNWFLSSIN

SEQ ID NO: 234 - protein, 256 aa, Borrelia burgdorferi; identical to SEQ ID NO: 233

SEQ ID NO: 235 - DNA, 771 bp, Borrelia burgdorferi
atgagaagattatttcttctatatattttatgttcttttgtttttttgaatttatttgctcaaggtagttcttcttatattgataagcaaaaagagcttgctattttttattatgaggttggtcaaagatatataaacgttggtaaaattaaaaaaggaaagctttttcaagcaaaagctttaaagatttatccagatttgaaaaaggggtttgatatcaagcttgcagttaaagagcttgatgctaggattaaagatgacaatcccaaggttgttatgcttgaggatattaagcttgaggagatacctggaatagtgcacgaaaaaatagaaatcaatgattttacaaatgctcctaaaatagaatatattgctcaaagagagagaagcaaaaatcaagataaaattattaagtttcaatttggaaagtttgcaagagctttaatttctaggaactttgatttgtttgattcagttattgcggataaagttaacgttatgggtcaatttgaatcaaaaaatgattttatatcaactttatcaagtgcttcatctaaggccgatgctgatgagttagagtatttatcagttgatgattattacgatttaaagtctttaaaaatttcaaaatccaacgatacttcttttgctgttaatgttaatgccaaaaaaaatgatgttactaaaaattttccattttggaaagaacgtcaaactttaatttttactacagaggatgataataattggtttttgtcttccataaattga

SEQ ID NO: 236 - DNA, 711 bp, Borrelia burgdorferi
caaggtagttcttcttatattgataagcaaaaagagcttgctattttttattatgaggttggtcaaagatatataaacgttggtaaaattaaaaaaggaaagctttttcaagcaaaagctttaaagatttatccagatttgaaaaaggggtttgatatcaagcttgcagttaaagagcttgatgctaggattaaagatgacaatcccaaggttgttatgcttgaggatattaagcttgaggagatacctggaatagtgcacgaaaaaatagaaatcaatgattttacaaatgctcctaaaatagaatatattgctcaaagagagagaagcaaaaatcaagataaaattattaagtttcaatttggaaagtttgcaagagctttaatttctaggaactttgatttgtttgattcagttattgcggataaagttaacgttatgggtcaatttgaatcaaaaaatgattttatatcaactttatcaagtgcttcatctaaggccgatgctgatgagttagagtatttatcagttgatgattattacgatttaaagtctttaaaaatttcaaaatccaacgatacttcttttgctgttaatgttaatgccaaaaaaaatgatgttactaaaaattttccattttggaaagaacgtcaaactttaatttttactacagaggatgataataattggtttttgtcttccataaattga

SEQ ID NO: 237 - protein, 668 aa, Borrelia burgdorferi
MLIFGFIGLFFLNIFSLHAQGIVTNKDAQEEFKWALNSYNNGIYDDALLSFKKILSFDPNNLDYHFWTGNVYYRLGYVEEALMEWRNLKDQGYKVPYLRHLISTIEQRRGIFSNYELNFKKLVKVASLDNSIYKRPHGYQITSLRADKYGGYYAANFVGNEILYFDVNNNVNALVKDGFSYLKSPYDVIEANNLLYVTLYSSDEIGVYDKVLGVKRKSIGNKGTKDGELLAPQYMAIDKRNYIYVSEWGNKRVSKFGLEGDFILHFGSRTSGYKGLLGPTGVTYLNENIYVADSLRNTIEVFDTSGNHLYSVFTSIEGIEGLSSDFVGNNVIVSSKDGVYKYSIAKKTITKILKADKMNSKISSSILDANNQMIVSDFNNAKVSVYKSDASLYDSLNVDVRRIIRLGGPKIYVELNVSSKSGLPVVGLKSENFSISNENYYIVNPKVAYNVNASKDINIAVVFDKSSYMKKYDTDQIVGLNALMELSKNKNFSFINATSVPIIDNIESLTNSIRNTSSLGPYSTDAVKTDVSLKLAGSGLMSKSSRRAVVYFSGGILNRKAFEKYSLDTIVSYYKNNDIRFYLILFGNDPINSKLQYLVNETGGAVIPFSSYEGVSKVYDLILEQKTGTYLLEYYYPGPQEPNKYFNLSVEANINQQTGRGEFAYFIN

SEQ ID NO: 238 - protein, 649 aa, Borrelia burgdorferi
QGIVTNKDAQEEFKWALNSYNNGIYDDALLSFKKILSFDPNNLDYHFWTGNVYYRLGYVEEALMEWRNLKDQGYKVPYLRHLISTIEQRRGIFSNYELNFKKLVKVASLDNSIYKRPHGYQITSLRADKYGGYYAANFVGNEILYFDVNNNVNALVKDGFSYLKSPYDVIEANNLLYVTLYSSDEIGVYDKVLGVKRKSIGNKGTKDGELLAPQYMAIDKRNYIYVSEWGNKRVSKFGLEGDFILHFGSRTSGYKGLLGPTGVTYLNENIYVADSLRNTIEVFDTSGNHLYSVFTSIEGIEGLSSDFVGNNVIVSSKDGVYKYSIAKKTITKILKADKMNSKISSSILDANNQMIVSDFNNAKVSVYKSDASLYDSLNVDVRRIIRLGGPKIYVELNVSSKSGLPVVGLKSENFSISNENYYIVNPKVAYNVNASKDINIAVVFDKSSYMKKYDTDQIVGLNALMELSKNKNFSFINATSVPIIDNIESLTNSIRNTSSLGPYSTDAVKTDVSLKLAGSGLMSKSSRRAVVYFSGGILNRKAFEKYSLDTIVSYYKNNDIRFYLILFGNDPINSKLQYLVNETGGAVIPFSSYEGVSKVYDLILEQKTGTYLLEYYYPGPQEPNKYFNLSVEANINQQTGRGEFAYFIN

SEQ ID NO: 239 - DNA, 2007 bp, Borrelia burgdorferi
atgttaatttttggttttattggtttgttttttttaaatatttttagtttgcatgcccaaggaatagttactaataaagatgctcaagaagagtttaaatgggctcttaattcttataataatggaatttacgatgatgctcttttatcttttaaaaaaattttaagctttgatcctaataatcttgattatcatttttggactggcaatgtttattatagactgggttatgttgaagaagctttaatggaatggagaaatttaaaagatcaaggctataaggttccctatcttagacatttgatttctactattgagcaaaggagaggtattttttcaaattatgaacttaattttaaaaaacttgtaaaagttgcttctcttgataattctatttataaaaggccacatgggtaccagattacatctttaagggctgataagtacggcggatattacgctgctaactttgtaggcaatgaaatattgtattttgatgttaataacaatgttaatgctttagttaaagatggctttagttatttaaaatcaccttatgatgttattgaagctaataatctgctttatgtgactctttattcaagtgatgaaattggtgtttatgacaaagttcttggagttaaaaggaaatctattgggaataaaggcacaaaagatggcgaattgcttgctcctcagtatatggctattgataagagaaactatatttatgtaagtgagtggggaaataaaagagtaagtaaatttggacttgaaggtgattttattttgcattttggttctagaacttcaggctataagggccttttaggtcccacaggcgttacttatttgaatgaaaacatttatgttgcagattctctgagaaataccattgaagtttttgatactagtggtaatcatttatattcagtttttacttctattgagggaatagaggggcttagcagtgattttgtaggtaataatgttatagtatcctcaaaagatggtgtttataaatatagcattgctaaaaagacaattacaaaaattttaaaagcagataaaatgaattctaaaatttcttcatctattttggatgccaataatcagatgattgtctcagattttaataatgccaaggtttcagtttacaagagtgatgcaagcctttatgatagtttaaatgttgatgttagaagaataattaggcttggagggcctaaaatttacgttgagcttaatgttagcagtaaaagcggattaccagttgttgggcttaaaagtgaaaatttttcaatttcaaatgaaaattattacattgtcaatcccaaggtggcatataatgtaaatgcttcaaaagacattaatatagcagttgtttttgataaatcttcttatatgaaaaaatatgatacagatcaaattgtagggttaaatgccctaatggagttgtcaaaaaataaaaactttagttttataaatgcaacaagtgtgcccattatagataatattgaaagcttaacaaatagcattagaaatacaagttctcttggtccttatagtacagatgctgtaaaaacagacgttagtttgaagttggcaggttctgggcttatgtcaaaaagctcaagaagagcagtagtttattttagtggtggtattttaaatcgtaaagcttttgaaaagtactctttagatacaatagtaagctattataaaaataatgatataaggttttacttaatactatttggtaatgatcctattaatagtaagcttcagtatttagttaatgaaacaggcggtgctgtaattcctttttcatcttatgaaggtgtatctaaagtttatgatttaattttagaacaaaaaacgggcacttatttgttggaatattattatccaggccctcaagaacctaataaatattttaatttatctgttgaagcaaatataaatcaacagacaggaagaggggagtttgcatattttattaattag

SEQ ID NO: 240 - DNA, 1950 bp, Borrelia burgdorferi
caaggaatagttactaataaagatgctcaagaagagtttaaatgggctcttaattcttataataatggaatttacgatgatgctcttttatcttttaaaaaaattttaagctttgatcctaataatcttgattatcatttttggactggcaatgtttattatagactgggttatgttgaagaagctttaatggaatggagaaatttaaaagatcaaggctataaggttccctatcttagacatttgatttctactattgagcaaaggagaggtattttttcaaattatgaacttaattttaaaaaacttgtaaaagttgcttctcttgataattctatttataaaaggccacatgggtaccagattacatctttaagggctgataagtacggcggatattacgctgctaactttgtaggcaatgaaatattgtattttgatgttaataacaatgttaatgctttagttaaagatggctttagttatttaaaatcaccttatgatgttattgaagctaataatctgctttatgtgactctttattcaagtgatgaaattggtgtttatgacaaagttcttggagttaaaaggaaatctattgggaataaaggcacaaaagatggcgaattgcttgctcctcagtatatggctattgataagagaaactatatttatgtaagtgagtggggaaataaaagagtaagtaaatttggacttgaaggtgattttattttgcattttggttctagaacttcaggctataagggccttttaggtcccacaggcgttacttatttgaatgaaaacatttatgttgcagattctctgagaaataccattgaagtttttgatactagtggtaatcatttatattcagtttttacttctattgagggaatagaggggcttagcagtgattttgtaggtaataatgttatagtatcctcaaaagatggtgtttataaatatagcattgctaaaaagacaattacaaaaattttaaaagcagataaaatgaattctaaaatttcttcatctattttggatgccaataatcagatgattgtctcagattttaataatgccaaggtttcagtttacaagagtgatgcaagcctttatgatagtttaaatgttgatgttagaagaataattaggcttggagggcctaaaatttacgttgagcttaatgttagcagtaaaagcggattaccagttgttgggcttaaaagtgaaaatttttcaatttcaaatgaaaattattacattgtcaatcccaaggtggcatataatgtaaatgcttcaaaagacattaatatagcagttgtttttgataaatcttcttatatgaaaaaatatgatacagatcaaattgtagggttaaatgccctaatggagttgtcaaaaaataaaaactttagttttataaatgcaacaagtgtgcccattatagataatattgaaagcttaacaaatagcattagaaatacaagttctcttggtccttatagtacagatgctgtaaaaacagacgttagtttgaagttggcaggttctgggcttatgtcaaaaagctcaagaagagcagtagtttattttagtggtggtattttaaatcgtaaagcttttgaaaagtactctttagatacaatagtaagctattataaaaataatgatataaggttttacttaatactatttggtaatgatcctattaatagtaagcttcagtatttagttaatgaaacaggcggtgctgtaattcctttttcatcttatgaaggtgtatctaaagtttatgatttaattttagaacaaaaaacgggcacttatttgttggaatattattatccaggccctcaagaacctaataaatattttaatttatctgttgaagcaaatataaatcaacagacaggaagaggggagtttgcatattttattaattag

SEQ ID NO: 241 - protein, 273 aa, Borrelia burgdorferi
MIKSILDYLLTLHPVLLGLLGSTFTWFTTAFGAAAVFFFRKVDNKIMDAMLGFSAGIMIAASFFSLIQPAIERAEELGYITWVPAVFGFLVGAFFIYIVDVFVPDLDKLTFIDEDLTKHGKKDFLLFTAVTLHNFPEGLAVGVAFGALASNPDIQTLVGAMLLTLGIGIQNIPEGAAISLPLRRGNVALAKCFNYGQMSGLVEIVGGLMGAYAVYSFTRILPFALAFSAGAMIYVSIEQLIPEAKRKDIDNKVPSIFGVIGFTLMMFLDVSLG

SEQ ID NO: 242 - protein, 239 aa, Borrelia burgdorferi
AVFFFRKVDNKIMDAMLGFSAGIMIAASFFSLIQPAIERAEELGYITWVPAVFGFLVGAFFIYIVDVFVPDLDKLTFIDEDLTKHGKKDFLLFTAVTLHNFPEGLAVGVAFGALASNPDIQTLVGAMLLTLGIGIQNIPEGAAISLPLRRGNVALAKCFNYGQMSGLVEIVGGLMGAYAVYSFTRILPFALAFSAGAMIYVSIEQLIPEAKRKDIDNKVPSIFGVIGFTLMMFLDVSLG

SEQ ID NO: 243 - DNA, 822 bp, Borrelia burgdorferi
atgataaaatcaattttagattatttattaactttgcatcctgtattattgggacttttaggttctactttcacttggtttactacagcttttggagcagcagcagtttttttctttagaaaggtagataataaaataatggacgctatgcttggtttttcagctggcattatgatagcggccagttttttttcgcttattcagcctgctatagaaagagctgaagagcttggatacattacttgggtgccggctgtttttggatttcttgttggggcattttttatatatattgtagatgtatttgttccagatctggataaacttacttttattgatgaagacttaactaaacatggtaaaaaagattttttactctttactgctgttactttacataattttccagaaggattggctgttggagttgcttttggagccttggcgtctaatccagatattcaaactttagttggggctatgcttcttacgcttggtattggtattcaaaatattcccgaaggagcagctatttctctgcctttaagaagaggtaatgttgctttggcaaaatgctttaactatggccaaatgtcaggattggtagaaattgtgggggggcttatgggtgcttatgcggtttattcttttactcgaattttaccttttgctttggctttttctgcaggagctatgatttatgtgtcaattgaacaattaatacctgaagctaagagaaaagacattgacaataaagtgccaagtatatttggtgttattggttttacattaatgatgtttctcgatgtttcactaggttaa

SEQ ID NO: 244 - DNA, 720 bp, Borrelia burgdorferi
gcagtttttttctttagaaaggtagataataaaataatggacgctatgcttggtttttcagctggcattatgatagcggccagttttttttcgcttattcagcctgctatagaaagagctgaagagcttggatacattacttgggtgccggctgtttttggatttcttgttggggcattttttatatatattgtagatgtatttgttccagatctggataaacttacttttattgatgaagacttaactaaacatggtaaaaaagattttttactctttactgctgttactttacataattttccagaaggattggctgttggagttgcttttggagccttggcgtctaatccagatattcaaactttagttggggctatgcttcttacgcttggtattggtattcaaaatattcccgaaggagcagctatttctctgcctttaagaagaggtaatgttgctttggcaaaatgctttaactatggccaaatgtcaggattggtagaaattgtgggggggcttatgggtgcttatgcggtttattcttttactcgaattttaccttttgctttggctttttctgcaggagctatgatttatgtgtcaattgaacaattaatacctgaagctaagagaaaagacattgacaataaagtgccaagtatatttggtgttattggttttacattaatgatgtttctcgatgtttcactaggttaa

SEQ ID NO: 245 - protein, 753 aa, Borrelia burgdorferi
MLLKLKYRFVGFLLLFLIFILLLFSTIFNFVLCGYLEDYYKQLTRAQVRRAAFSLQSFLDTLHVIINGAASNLALETISEFAMSENRGKDFSESELIDLRKNPKFVIDSVKVSKKYRQYLYNFMANLKNDTLFEEFAFFDFEGRVIVSTRHENNMDFGHSEANTNYFKKAVEDYRQNQLKFIGWYSNLSEGISAEVAIRSKQSEKKAFAIIVPVYSPEDKLVCGYLAGYLLNDIVADSFDRFRFGFYKRGNFIYVDPNNIAVNPFEEYNETSRVSSKFLNVLKDVFSKPPFPSNIASEVSVYTIDRILLSEMGEDCYYAMLPISSKLGEKSGVLIARLPYKDIYGVISSLRFQYILYSVLGIIALSIVLSIRIDRIISFRLNAIRVLVQDMVKGNLDKDYALDDDENTLDELGMLSLQVVKMKKAISVAISSVLRNISYVNKASLEVASSSQNLSSSALQQASALEEMSANVEQIASGVNMSANNSYETEQIALKTNENSQIGGRAVEESVIAMQDIVEKVSVIEEIARKTNLLALNAAIEAARAGDEGKGFAVVASEIRKLADLSKISALEIGELVEDNSKVATEAGVIFKEMLPEIEETANLVKKISEGSSKQSDQIAQFKMALDQVGEVVQSSASSSEQLSSMSDKMLEKSKELRKSVLFFKIKDSKIENPENDDYDFRLIDCPENSFKDENQNLKSNGISTSNASGHNNYSLDIESESSVRTINKRVDPKKAIDIADKDLNFDDDFSEF

SEQ ID NO: 246 - protein, 723 aa, Borrelia burgdorferi
VLCGYLEDYYKQLTRAQVRRAAFSLQSFLDTLHVIINGAASNLALETISEFAMSENRGKDFSESELIDLRKNPKFVIDSVKVSKKYRQYLYNFMANLKNDTLFEEFAFFDFEGRVIVSTRHENNMDFGHSEANTNYFKKAVEDYRQNQLKFIGWYSNLSEGISAEVAIRSKQSEKKAFAIIVPVYSPEDKLVCGYLAGYLLNDIVADSFDRFRFGFYKRGNFIYVDPNNIAVNPFEEYNETSRVSSKFLNVLKDVFSKPPFPSNIASEVSVYTIDRILLSEMGEDCYYAMLPISSKLGEKSGVLIARLPYKDIYGVISSLRFQYILYSVLGIIALSIVLSIRIDRIISFRLNAIRVLVQDMVKGNLDKDYALDDDENTLDELGMLSLQVVKMKKAISVAISSVLRNISYVNKASLEVASSSQNLSSSALQQASALEEMSANVEQIASGVNMSANNSYETEQIALKTNENSQIGGRAVEESVIAMQDIVEKVSVIEEIARKTNLLALNAAIEAARAGDEGKGFAVVASEIRKLADLSKISALEIGELVEDNSKVATEAGVIFKEMLPEIEETANLVKKISEGSSKQSDQIAQFKMALDQVGEVVQSSASSSEQLSSMSDKMLEKSKELRKSVLFFKIKDSKIENPENDDYDFRLIDCPENSFKDENQNLKSNGISTSNASGHNNYSLDIESESSVRTINKRVDPKKAIDIADKDLNFDDDFSEF

SEQ ID NO: 247 - DNA, 2262 bp, Borrelia burgdorferi
atgttattgaagcttaaatacaggtttgttggatttttattattgtttttaatttttatactgctacttttttccacgatttttaattttgttttatgcggttatttagaagattattataagcagcttacaagggcgcaagtaagaagagcagctttttctttgcaatcttttttagacaccctgcatgtcataatcaatggtgcagcttctaatttggcacttgaaaccatatcagaatttgcaatgtctgagaatagaggaaaagatttctctgagtcggaattgatagatttaagaaaaaatccaaaatttgttattgactctgtaaaggtgagcaaaaaatatcgacaatacttatacaattttatggccaatcttaaaaatgataccctttttgaagaattcgctttttttgattttgaagggagagtaattgttagcacaagacatgagaataatatggattttggtcattctgaggctaataccaattattttaaaaaagctgttgaggattataggcaaaaccaattaaaatttataggttggtattcaaatctttctgaaggaatatccgcagaagttgctattaggtctaaacaaagcgaaaaaaaggcttttgcaataattgtacctgtatattccccagaagataaacttgtttgtgggtatttggccggatatttgcttaatgatattgtggcagatagttttgatagatttagattcggtttttataaaagaggcaattttatttatgtggatcccaacaatatagcagttaatccttttgaagaatataatgaaaccagcagggttagttctaaatttttgaatgttcttaaagatgttttctctaagcccccttttccatcaaacattgccagtgaagtgtcggtttacactattgatagaatacttttgtccgaaatgggagaagattgttattatgcaatgttgcccataagtagtaaattgggagaaaagagtggagtacttattgctaggcttccttataaggatatttacggagtaatatctagtctaagatttcagtatattttatattcagtcttaggcattatagcattaagtattgttctttcaattagaatagacaggattattagttttcgtttaaacgcaattagagttctagttcaagatatggttaagggcaatttagataaagattatgctcttgatgatgatgaaaatactcttgatgaacttggcatgttaagtcttcaggttgttaaaatgaaaaaagctatttctgtagcaatttctagtgttttgagaaatattagctatgtaaataaggcaagtttagaagttgccagttcaagtcaaaatttaagctctagtgcattgcaacaggcatctgctcttgaagaaatgtcagctaatgttgagcaaatagcctcaggtgtcaacatgagcgccaataattcttatgaaacagaacaaatagctttaaagacgaatgaaaattctcagataggtggtagggccgttgaagaatctgttattgctatgcaagacattgtggagaaagttagtgttattgaagagatagctagaaaaaccaatttacttgctttgaatgcggctattgaagctgcaagagcaggagatgagggaaagggatttgctgttgtggccagtgagattagaaagttggctgatttgagtaaaatttctgctcttgagattggagagttagttgaagataactctaaggtagcaactgaagcgggagtgatctttaaagaaatgctacccgaaattgaagaaacggctaatcttgttaagaagatttcagaaggtagctctaagcaaagcgatcagattgctcaatttaaaatggctttagatcaggttggagaagttgttcaatcttcagcttcaagcagtgagcagctttctagtatgtccgataaaatgttagaaaagtctaaggaacttagaaaatctgtattatttttcaaaattaaagattctaaaattgaaaatccagaaaatgatgattatgatttcaggttaatagattgtcctgaaaattcttttaaagatgaaaatcaaaatttgaaaagcaatggaatttctacttcaaatgccagtgggcataataattattctttagatattgagagcgaatcttctgtaagaactattaataagcgagttgatcctaaaaaagctatcgatattgctgataaggatttaaattttgatgatgatttttcagagttttag

SEQ ID NO: 248 - DNA, 2172 bp, Borrelia burgdorferi
gttttatgcggttatttagaagattattataagcagcttacaagggcgcaagtaagaagagcagctttttctttgcaatcttttttagacaccctgcatgtcataatcaatggtgcagcttctaatttggcacttgaaaccatatcagaatttgcaatgtctgagaatagaggaaaagatttctctgagtcggaattgatagatttaagaaaaaatccaaaatttgttattgactctgtaaaggtgagcaaaaaatatcgacaatacttatacaattttatggccaatcttaaaaatgataccctttttgaagaattcgctttttttgattttgaagggagagtaattgttagcacaagacatgagaataatatggattttggtcattctgaggctaataccaattattttaaaaaagctgttgaggattataggcaaaaccaattaaaatttataggttggtattcaaatctttctgaaggaatatccgcagaagttgctattaggtctaaacaaagcgaaaaaaaggcttttgcaataattgtacctgtatattccccagaagataaacttgtttgtgggtatttggccggatatttgcttaatgatattgtggcagatagttttgatagatttagattcggtttttataaaagaggcaattttatttatgtggatcccaacaatatagcagttaatccttttgaagaatataatgaaaccagcagggttagttctaaatttttgaatgttcttaaagatgttttctctaagcccccttttccatcaaacattgccagtgaagtgtcggtttacactattgatagaatacttttgtccgaaatgggagaagattgttattatgcaatgttgcccataagtagtaaattgggagaaaagagtggagtacttattgctaggcttccttataaggatatttacggagtaatatctagtctaagatttcagtatattttatattcagtcttaggcattatagcattaagtattgttctttcaattagaatagacaggattattagttttcgtttaaacgcaattagagttctagttcaagatatggttaagggcaatttagataaagattatgctcttgatgatgatgaaaatactcttgatgaacttggcatgttaagtcttcaggttgttaaaatgaaaaaagctatttctgtagcaatttctagtgttttgagaaatattagctatgtaaataaggcaagtttagaagttgccagttcaagtcaaaatttaagctctagtgcattgcaacaggcatctgctcttgaagaaatgtcagctaatgttgagcaaatagcctcaggtgtcaacatgagcgccaataattcttatgaaacagaacaaatagctttaaagacgaatgaaaattctcagataggtggtagggccgttgaagaatctgttattgctatgcaagacattgtggagaaagttagtgttattgaagagatagctagaaaaaccaatttacttgctttgaatgcggctattgaagctgcaagagcaggagatgagggaaagggatttgctgttgtggccagtgagattagaaagttggctgatttgagtaaaatttctgctcttgagattggagagttagttgaagataactctaaggtagcaactgaagcgggagtgatctttaaagaaatgctacccgaaattgaagaaacggctaatcttgttaagaagatttcagaaggtagctctaagcaaagcgatcagattgctcaatttaaaatggctttagatcaggttggagaagttgttcaatcttcagcttcaagcagtgagcagctttctagtatgtccgataaaatgttagaaaagtctaaggaacttagaaaatctgtattatttttcaaaattaaagattctaaaattgaaaatccagaaaatgatgattatgatttcaggttaatagattgtcctgaaaattcttttaaagatgaaaatcaaaatttgaaaagcaatggaatttctacttcaaatgccagtgggcataataattattctttagatattgagagcgaatcttctgtaagaactattaataagcgagttgatcctaaaaaagctatcgatattgctgataaggatttaaattttgatgatgatttttcagagttttag

SEQ ID NO: 249 - protein, 383 aa, Borrelia burgdorferi
MTISKNVFSKFILKFLNSSAFVSVFALFVGFLIVGLVVMGLGHSPFRMYFIILEIIFSSPKHLGYVLSYSAPLIFTGLSIGISLKAGLFNIGVEGQFILGSIVALIASVLLDLPPILHVITIFIITFLASGSLGILIGYLKAKFNISEVISGIMFNWILFHLNNIILDFSFIKRDNSDFSKPIKESAYIDFLASWKLSPEGLAYRSSHPFVNELLKAPLHFGIILGIIFAILIWFLLNKTIIGFKINATGSNIEASRCMGINVKAVLIFSMFLSAAVAGLAGAIQLMGVNKAIFKLSYMQGIGFNGIAASLMGNNSPIGIIFSSILFSILLYGSSRVQSLMGLPSSIVSLMMGIIVLVISASYFLNKIVLKGVKRVKYNNILD

SEQ ID NO: 250 - protein, 348 aa, Borrelia burgdorferi
LVVMGLGHSPFRMYFIILEIIFSSPKHLGYVLSYSAPLIFTGLSIGISLKAGLFNIGVEGQFILGSIVALIASVLLDLPPILHVITIFIITFLASGSLGILIGYLKAKFNISEVISGIMFNWILFHLNNIILDFSFIKRDNSDFSKPIKESAYIDFLASWKLSPEGLAYRSSHPFVNELLKAPLHFGIILGIIFAILIWFLLNKTIIGFKINATGSNIEASRCMGINVKAVLIFSMFLSAAVAGLAGAIQLMGVNKAIFKLSYMQGIGFNGIAASLMGNNSPIGIIFSSILFSILLYGSSRVQSLMGLPSSIVSLMMGIIVLVISASYFLNKIVLKGVKRVKYNNILD

SEQ ID NO: 251 - DNA, 1152 bp, Borrelia burgdorferi
atgacaattagtaaaaacgtatttagtaaatttattttgaaatttttaaattcttcagcatttgttagtgtatttgctctatttgttggatttttaattgttgggctagtggtgatggggcttggtcattctccttttagaatgtattttataatattagaaattattttttcttctcccaaacatttaggttatgttttaagttattcagctcctttgatttttacaggtctttctattggtatttctttaaaagcgggtctttttaatattggggttgaaggccagtttatactaggatctattgttgctttaatagcatcagttttacttgatttgcctccaattttacatgtaattactatttttattattacttttttagcttcaggcagtttaggaattttaatcggatatttaaaagccaaattcaatattagcgaagtgatttcaggaataatgtttaattggatattatttcatttaaataatataattttagattttagttttattaaaagagataatagtgatttttcaaaacccattaaagaaagcgcatatattgattttttagcttcttggaagctctcaccagaaggtcttgcttatagatcttctcatccttttgttaatgagcttttaaaagcacctcttcattttggaataattttaggtataatttttgctattttaatatggtttttacttaataaaactattattggatttaaaataaatgccacaggaagtaatattgaagcttcaagatgtatgggtattaatgtaaaagctgtgctaattttttcaatgtttctctcagcagctgttgcaggtcttgctggtgctattcaacttatgggtgttaataaagctatatttaagctttcttatatgcaaggaattggttttaatgggatagctgcttctcttatgggaaacaattcgccaattggcataatattttctagcattcttttttctatattgctttatggaagcagtagagttcaaagtttaatgggccttccatcttcaattgtatctttgatgatgggaataattgttcttgtaatttctgctagctattttttaaataaaattgttttaaaaggtgttaagcgtgtcaaatataataatattcttgattag

SEQ ID NO: 252 - DNA, 1050 bp, Borrelia burgdorferi
gggctagtggtgatggggcttggtcattctccttttagaatgtattttataatattagaaattattttttcttctcccaaacatttaggttatgttttaagttattcagctcctttgatttttacaggtctttctattggtatttctttaaaagcgggtctttttaatattggggttgaaggccagtttatactaggatctattgttgctttaatagcatcagttttacttgatttgcctccaattttacatgtaattactatttttattattacttttttagcttcaggcagtttaggaattttaatcggatatttaaaagccaaattcaatattagcgaagtgatttcaggaataatgtttaattggatattatttcatttaaataatataattttagattttagttttattaaaagagataatagtgatttttcaaaacccattaaagaaagcgcatatattgattttttagcttcttggaagctctcaccagaaggtcttgcttatagatcttctcatccttttgttaatgagcttttaaaagcacctcttcattttggaataattttaggtataatttttgctattttaatatggtttttacttaataaaactattattggatttaaaataaatgccacaggaagtaatattgaagcttcaagatgtatgggtattaatgtaaaagctgtgctaattttttcaatgtttctctcagcagctgttgcaggtcttgctggtgctattcaacttatgggtgttaataaagctatatttaagctttcttatatgcaaggaattggttttaatgggatagctgcttctcttatgggaaacaattcgccaattggcataatattttctagcattcttttttctatattgctttatggaagcagtagagttcaaagtttaatgggccttccatcttcaattgtatctttgatgatgggaataattgttcttgtaatttctgctagctattttttaaataaaattgttttaaaaggtgttaagcgtgtcaaatataataatattcttgattag

SEQ ID NO: 253 - protein, 348 aa, Borrelia burgdorferi
MVKKFSIFLKAIIIFSIFELLIEELSIILFLPYKIRFALIFLGFLFDTIFIFIFLYKITKAYLSQRLEIYVRNNLFFDIIHCLIPLAFYSSYQLKNIIVAHETILNPIMLSLFKLRFLRLLRFNDLIIEIYYNSKEKNLILIAFARTFSMSLLIPFTFFIIISSSKIVNSIPEKQEFNIIKNISIINEKAYIKEKYPFILIIKEKDDIIYSKSDEIFVYYSPSEYRVIEMEKTKFYIDKYLQRKSDSILGIFLFTLFASFTIFLMNFYKFFKASFLNPIILMTKILQDPLEYRKIQIPFTLSEEKVYELAKSFNNLLLKEKLNSKRKSKIPLEIEKVKKIINKNQEIK

SEQ ID NO: 254 - protein, 337 aa, Borrelia burgdorferi
IIIFSIFELLIEELSIILFLPYKIRFALIFLGFLFDTIFIFIFLYKITKAYLSQRLEIYVRNNLFFDIIHCLIPLAFYSSYQLKNIIVAHETILNPIMLSLFKLRFLRLLRFNDLIIEIYYNSKEKNLILIAFARTFSMSLLIPFTFFIIISSSKIVNSIPEKQEFNIIKNISIINEKAYIKEKYPFILIIKEKDDIIYSKSDEIFVYYSPSEYRVIEMEKTKFYIDKYLQRKSDSILGIFLFTLFASFTIFLMNFYKFFKASFLNPIILMTKILQDPLEYRKIQIPFTLSEEKVYELAKSFNNLLLKEKLNSKRKSKIPLEIEKVKKIINKNQEIK

SEQ ID NO: 255 - DNA, 1047 bp, Borrelia burgdorferi
atggtaaaaaaattttcaattttcttaaaagcaataataattttttcaatatttgaacttttaatcgaagaactctcaataattctttttttaccatacaaaatacgatttgcactaatatttcttgggtttctatttgacacaatttttattttcatttttttatacaaaataaccaaggcctacctttcccaaagattagaaatctacgtcagaaacaatctattcttcgatataatccactgccttattcctttagcgttttatagctcatatcagcttaaaaacataattgtcgcccatgaaacaatattaaatccaataatgctatcacttttcaagttaagatttttaagacttcttaggtttaatgacctaataatagaaatatattacaattcaaaagaaaagaacctaatactaatagcatttgctaggacattttcaatgagcttattaataccatttacattttttataataatatcaagctcaaaaattgtaaattcaataccagaaaaacaagaatttaatatcattaaaaatatatcaataataaatgaaaaagcttacattaaagaaaaatatcccttcatcttaataatcaaggaaaaagatgacataatatactcaaaatcagacgaaatatttgtttactacagtcccagtgaatatagagtaatagaaatggagaaaacaaaattttatatagataaatatttgcaaagaaaaagcgattctattcttggaatttttctatttacattgtttgcatcatttactatttttttaatgaatttttataaattttttaaagcaagctttttaaatcctattattttaatgacaaaaattttacaagacccattagaatatcgaaaaattcaaattccttttactttaagcgaagaaaaagtatatgaacttgcaaaatcatttaacaatctcttgctaaaagaaaaactaaactcaaagcgaaaaagcaaaatacctttagaaattgaaaaagtaaaaaaaataattaataaaaaccaggaaataaaatga

SEQ ID NO: 256 - DNA, 1014 bp, Borrelia burgdorferi
ataataattttttcaatatttgaacttttaatcgaagaactctcaataattctttttttaccatacaaaatacgatttgcactaatatttcttgggtttctatttgacacaatttttattttcatttttttatacaaaataaccaaggcctacctttcccaaagattagaaatctacgtcagaaacaatctattcttcgatataatccactgccttattcctttagcgttttatagctcatatcagcttaaaaacataattgtcgcccatgaaacaatattaaatccaataatgctatcacttttcaagttaagatttttaagacttcttaggtttaatgacctaataatagaaatatattacaattcaaaagaaaagaacctaatactaatagcatttgctaggacattttcaatgagcttattaataccatttacattttttataataatatcaagctcaaaaattgtaaattcaataccagaaaaacaagaatttaatatcattaaaaatatatcaataataaatgaaaaagcttacattaaagaaaaatatcccttcatcttaataatcaaggaaaaagatgacataatatactcaaaatcagacgaaatatttgtttactacagtcccagtgaatatagagtaatagaaatggagaaaacaaaattttatatagataaatatttgcaaagaaaaagcgattctattcttggaatttttctatttacattgtttgcatcatttactatttttttaatgaatttttataaattttttaaagcaagctttttaaatcctattattttaatgacaaaaattttacaagacccattagaatatcgaaaaattcaaattccttttactttaagcgaagaaaaagtatatgaacttgcaaaatcatttaacaatctcttgctaaaagaaaaactaaactcaaagcgaaaaagcaaaatacctttagaaattgaaaaagtaaaaaaaataattaataaaaaccaggaaataaaatga

SEQ ID NO: 257 - protein, 322 aa, Borrelia burgdorferi
MKIQIIIMLLALLDFPLNARLLDISIEKRADEEIKKYSSYNLILEKEYYTNFPTSEIEKNIYKLTEHFVKSIMLNKTNYSLLNSNYKEANKYLIQSELIDKKFLKYKIFKIKNINGIFKSHSLIYTKKGFYKLELYIENNAEPLKIFNLNITYFLKNLDKISNEMIFFPREKREVNMIQKTTIAADSSSKPRGINYDTGIPFNVLIVDDSVFTVKQLTQIFTSEGFNIIDTAADGEEAVIKYKNHYPNIDIVTLDITMPKMDGITCLSNIMEFDKNARVIMISALGKEQLVKDCLIKGAKTFIVKPLDRAKVLQRVMSVFVK

SEQ ID NO: 258 - protein, 303 aa, Borrelia burgdorferi
RLLDISIEKRADEEIKKYSSYNLILEKEYYTNFPTSEIEKNIYKLTEHFVKSIMLNKTNYSLLNSNYKEANKYLIQSELIDKKFLKYKIFKIKNINGIFKSHSLIYTKKGFYKLELYIENNAEPLKIFNLNITYFLKNLDKISNEMIFFPREKREVNMIQKTTIAADSSSKPRGINYDTGIPFNVLIVDDSVFTVKQLTQIFTSEGFNIIDTAADGEEAVIKYKNHYPNIDIVTLDITMPKMDGITCLSNIMEFDKNARVIMISALGKEQLVKDCLIKGAKTFIVKPLDRAKVLQRVMSVFVK

SEQ ID NO: 259 - DNA, 516 bp, Borrelia burgdorferi
atgaaaattcaaataattataatgctgcttgcattgttagattttccacttaatgccagacttttggacatttcaattgaaaaaagagcagatgaagaaataaaaaaatattcgtcttataatttaattttagaaaaagaatactataccaattttccaacaagcgaaatagaaaaaaatatttataaactaacagaacattttgtaaaaagcataatgctcaataaaactaactacagcttattaaattcaaactacaaagaagcaaataaatatctaattcaaagcgaactcattgataaaaaatttttaaaatataaaatatttaaaatcaaaaatataaatggaatttttaaaagccattcactaatatatacaaaaaaaggattttacaaattagaactttacatagaaaataatgcagaacctctaaaaatatttaaccttaacattacttattttttaaagaatttagataaaataagtaatgaaatgatttttttcccaagggaatga

SEQ ID NO: 260 - DNA, 459 bp, Borrelia burgdorferi
agacttttggacatttcaattgaaaaaagagcagatgaagaaataaaaaaatattcgtcttataatttaattttagaaaaagaatactataccaattttccaacaagcgaaatagaaaaaaatatttataaactaacagaacattttgtaaaaagcataatgctcaataaaactaactacagcttattaaattcaaactacaaagaagcaaataaatatctaattcaaagcgaactcattgataaaaaatttttaaaatataaaatatttaaaatcaaaaatataaatggaatttttaaaagccattcactaatatatacaaaaaaaggattttacaaattagaactttacatagaaaataatgcagaacctctaaaaatatttaaccttaacattacttattttttaaagaatttagataaaataagtaatgaaatgatttttttcccaagggaatga

SEQ ID NO: 261 - protein, 274 aa, Borrelia burgdorferi
MLKTLTKIITISCLIVGCASLPYTPPKQNLNYLMELLPGANLYAHVNLIKNRSIYNSLSPKYKSVLGLISNLYFSYKKENNDFALLIMGNFPKDIFWGIHKNRNTESIGNIFTNPKWKLKNSNIYIIPNKARTSIAITQKDITAKDNNMLTTKYIGEIEKNEMFFWIQDPTLLLPNQIVSSKNLIPFSSGTLSINSLNQEEYIFKSLIKTNNPPILKILSKKLIPTVLTNMTNLTISSHIKTTIKDQNTVEIEFNIQKSSVESLIEKLASNIQT

SEQ ID NO: 262 - protein, 253 aa, Borrelia burgdorferi
PYTPPKQNLNYLMELLPGANLYAHVNLIKNRSIYNSLSPKYKSVLGLISNLYFSYKKENNDFALLIMGNFPKDIFWGIHKNRNTESIGNIFTNPKWKLKNSNIYIIPNKARTSIAITQKDITAKDNNMLTTKYIGEIEKNEMFFWIQDPTLLLPNQIVSSKNLIPFSSGTLSINSLNQEEYIFKSLIKTNNPPILKILSKKLIPTVLTNMTNLTISSHIKTTIKDQNTVEIEFNIQKSSVESLIEKLASNIQT

SEQ ID NO: 263 - DNA, 825 bp, Borrelia burgdorferi
atgttaaaaacattaacaaaaataattaccatttcatgcctcatagtgggatgcgcaagcctgccttacactcctccaaaacaaaatctaaattacttaatggaacttttacctggcgcaaatttatacgcccatgtaaatttaattaaaaacaggtctatttataactctttaagccctaaatataaatcagttcttgggcttataagcaatttatactttagctataaaaaagaaaataacgattttgctctactaataatgggtaatttcccaaaagatattttctggggaattcataaaaatagaaatacagaatcaataggcaatatatttacaaatccaaaatggaaacttaaaaattcaaatatatacattattccaaacaaagctagaactagcattgcaataacccaaaaagatataaccgcaaaagacaataatatgctaacaacaaaatatattggggaaatagaaaaaaatgaaatgtttttttggattcaagatccaacattattgctcccaaaccaaatagtaagcagcaaaaatttaattccctttagcagtggaactttgtctataaacagcttaaatcaagaagaatatatttttaaatccttaatcaaaacaaataatccaccaatactaaaaatattgtcaaaaaagttaattccaaccgtcttgacaaacatgacaaacctcacaatatcaagccacataaagaccacaataaaagaccaaaatacggttgaaatagaatttaatattcaaaaatctagtgttgaaagccttatagaaaaactagcttcaaatattcaaacctaa

SEQ ID NO: 264 - DNA, 762 bp, Borrelia burgdorferi
ccttacactcctccaaaacaaaatctaaattacttaatggaacttttacctggcgcaaatttatacgcccatgtaaatttaattaaaaacaggtctatttataactctttaagccctaaatataaatcagttcttgggcttataagcaatttatactttagctataaaaaagaaaataacgattttgctctactaataatgggtaatttcccaaaagatattttctggggaattcataaaaatagaaatacagaatcaataggcaatatatttacaaatccaaaatggaaacttaaaaattcaaatatatacattattccaaacaaagctagaactagcattgcaataacccaaaaagatataaccgcaaaagacaataatatgctaacaacaaaatatattggggaaatagaaaaaaatgaaatgtttttttggattcaagatccaacattattgctcccaaaccaaatagtaagcagcaaaaatttaattccctttagcagtggaactttgtctataaacagcttaaatcaagaagaatatatttttaaatccttaatcaaaacaaataatccaccaatactaaaaatattgtcaaaaaagttaattccaaccgtcttgacaaacatgacaaacctcacaatatcaagccacataaagaccacaataaaagaccaaaatacggttgaaatagaatttaatattcaaaaatctagtgttgaaagccttatagaaaaactagcttcaaatattcaaacctaa

SEQ ID NO: 265 - protein, 136 aa, Borrelia burgdorferi
MGITVFYLFSIFASFVLGSSMDSVKENVLKSTIFYYDVEEVEFPYARKQTLQFIAKTHLKYAVFNFDKNKMFSYTFVFDKKLISQYAIFIEVKKKFGEATLVTPLNYLWDLGDSIIVLNKNILRITLKSYISNYNK

SEQ ID NO: 266 - protein, 117 aa, Borrelia burgdorferi
SMDSVKENVLKSTIFYYDVEEVEFPYARKQTLQFIAKTHLKYAVFNFDKNKMFSYTFVFDKKLISQYAIFIEVKKKFGEATLVTPLNYLWDLGDSIIVLNKNILRITLKSYISNYNK

SEQ ID NO: 267 - DNA, 411 bp, Borrelia burgdorferi
atgggtattacagttttttatttattttctatttttgcatcttttgttctgggttctagcatggattctgttaaagagaatgttctcaagagcactattttttattatgatgttgaagaagttgaatttccttatgctaggaagcagactttacaatttattgctaaaacccatttaaaatatgctgtttttaattttgacaaaaataaaatgttttcgtacacttttgtttttgataaaaaattaatatctcagtatgcaatttttattgaggtaaagaaaaagtttggcgaggctacactagtaacgcctttgaattatttatgggatcttggtgattctattattgttttaaataaaaatattttaagaattactttaaaatcttatatttcaaattataataaatga

SEQ ID NO: 268 - DNA, 354 bp, Borrelia burgdorferi
agcatggattctgttaaagagaatgttctcaagagcactattttttattatgatgttgaagaagttgaatttccttatgctaggaagcagactttacaatttattgctaaaacccatttaaaatatgctgtttttaattttgacaaaaataaaatgttttcgtacacttttgtttttgataaaaaattaatatctcagtatgcaatttttattgaggtaaagaaaaagtttggcgaggctacactagtaacgcctttgaattatttatgggatcttggtgattctattattgttttaaataaaaatattttaagaattactttaaaatcttatatttcaaattataataaatga

SEQ ID NO: 269 - protein, 449 aa, Borrelia burgdorferi
MYMENIEVRGQPNFFGLIPFFVFIIIYLGTGIYLGVIGVEMAFYQLPASVAMFFASIVCFLVFKGKFSDKIHIFIKGAAQYDIILMCLIFMLSGAFSSLCKEIGCVETVANLGIKYINPNWIVSGIFFVTCFLSFSAGTSVGSIVAIAPIAFNIAVKSGINPNLIAASVMCGAMFGDNLSLISDTTIVSSRTQGSSILDVFISSSFYAFPSAILTFFSFFFLSENLSNATNFLHESSIDLVKTVPYLMIIFFSLAGMNVFIVLFLGILSICLISVLYGNLYFLDVMKNINKGFLNMADLIFLSILTGGVSFAVIHNGGFKWLLIKLKSLIRGKSSAEFSIGAFVSIVDVFLANNTIAILICGKVAKKIAFENNISVQRSASILDMFSCIFQGIIPYGAQMIILVNFSNGLVSPISILPFLVYFGFLLFFVILSILGLDIKKVFLFFLKK

SEQ ID NO: 270 - protein, 389 aa, Borrelia burgdorferi
LVFKGKFSDKIHIFIKGAAQYDIILMCLIFMLSGAFSSLCKEIGCVETVANLGIKYINPNWIVSGIFFVTCFLSFSAGTSVGSIVAIAPIAFNIAVKSGINPNLIAASVMCGAMFGDNLSLISDTTIVSSRTQGSSILDVFISSSFYAFPSAILTFFSFFFLSENLSNATNFLHESSIDLVKTVPYLMIIFFSLAGMNVFIVLFLGILSICLISVLYGNLYFLDVMKNINKGFLNMADLIFLSILTGGVSFAVIHNGGFKWLLIKLKSLIRGKSSAEFSIGAFVSIVDVFLANNTIAILICGKVAKKIAFENNISVQRSASILDMFSCIFQGIIPYGAQMIILVNFSNGLVSPISILPFLVYFGFLLFFVILSILGLDIKKVFLFFLKK

SEQ ID NO: 271 - DNA, 1350 bp, Borrelia burgdorferi
atgtatatggaaaatattgaagtaagagggcagccaaatttttttgggcttattcctttttttgtttttattattatctatttaggcacggggatttatttgggagttattggtgtagaaatggccttttatcaactgccggctagtgttgcaatgttttttgcttccattgtttgttttttggtatttaaaggaaaattttccgacaaaattcacatatttattaaaggagcagctcagtacgatattatactaatgtgtcttatttttatgctttcgggagctttctcttctctttgtaaagaaataggctgcgttgaaactgtagcaaatttgggaattaaatatattaatcctaattggattgtttctggtatattttttgtaacctgctttctttctttttctgccggcacttctgttggatctatcgttgcaattgctcctattgcttttaatattgctgttaaaagcggcattaatccgaatttaatagcagcatctgtaatgtgtggagctatgtttggagataatctttctttaatatcagatacaactattgtttctagtcgaactcaaggtagtagcatcttagatgtttttattagtagcagtttttatgcttttccatccgccatactaacttttttttcttttttctttctttctgaaaatttgtccaatgccacaaactttttacacgaaagttcaatagatttagtgaaaactgtgccttatttaatgattatatttttctctttagctggaatgaatgtttttatagttctttttttaggtattctttctatatgtcttattagcgttttgtatggtaatttatactttctagatgtaatgaaaaacattaataaagggtttttaaatatggcggatttgatttttctttcaattttaacagggggagtttcttttgccgtgattcataatggaggctttaaatggctacttattaaattaaaatccttgattagaggaaaaagttcagcggaattttctattggggcttttgtttcaatagttgatgtttttcttgctaataacacaattgccatacttatttgcggcaaagtagcaaaaaagatagcttttgaaaataacatcagtgttcaaagaagtgcttctattttagatatgttctcttgtatttttcaaggcattattccttatggtgcgcaaatgattattttagtgaatttttcaaatggacttgtgtcgccaattagtattttgccatttttagtttattttggatttttattgttttttgttattttatctattttgggccttgatataaaaaaagtttttttattttttttaaaaaaataa

SEQ ID NO: 272 - DNA, 1170 bp, Borrelia burgdorferi
ttggtatttaaaggaaaattttccgacaaaattcacatatttattaaaggagcagctcagtacgatattatactaatgtgtcttatttttatgctttcgggagctttctcttctctttgtaaagaaataggctgcgttgaaactgtagcaaatttgggaattaaatatattaatcctaattggattgtttctggtatattttttgtaacctgctttctttctttttctgccggcacttctgttggatctatcgttgcaattgctcctattgcttttaatattgctgttaaaagcggcattaatccgaatttaatagcagcatctgtaatgtgtggagctatgtttggagataatctttctttaatatcagatacaactattgtttctagtcgaactcaaggtagtagcatcttagatgtttttattagtagcagtttttatgcttttccatccgccatactaacttttttttcttttttctttctttctgaaaatttgtccaatgccacaaactttttacacgaaagttcaatagatttagtgaaaactgtgccttatttaatgattatatttttctctttagctggaatgaatgtttttatagttctttttttaggtattctttctatatgtcttattagcgttttgtatggtaatttatactttctagatgtaatgaaaaacattaataaagggtttttaaatatggcggatttgatttttctttcaattttaacagggggagtttcttttgccgtgattcataatggaggctttaaatggctacttattaaattaaaatccttgattagaggaaaaagttcagcggaattttctattggggcttttgtttcaatagttgatgtttttcttgctaataacacaattgccatacttatttgcggcaaagtagcaaaaaagatagcttttgaaaataacatcagtgttcaaagaagtgcttctattttagatatgttctcttgtatttttcaaggcattattccttatggtgcgcaaatgattattttagtgaatttttcaaatggacttgtgtcgccaattagtattttgccatttttagtttattttggatttttattgttttttgttattttatctattttgggccttgatataaaaaaagtttttttattttttttaaaaaaataa

SEQ ID NO: 273 - protein, 241 aa, Borrelia burgdorferi
MRKCFVSLSLLLIFFACSSNVEIELNDDISGIVSIFVNVNREFEKIRKELLTTLVGEEIANMPLFPVDEIKKYFKNGEEKLGLKLLSIKTQGDSINLVVKFDNLIKILGDYMKKPDISVFKIEKKDGKNIIELNINLENATKNINENKEYISDALAALLPSDEIPMSAKEYKDVLVYFLSDFTSKASELIDNSKLNLVVKTSRNVQEQFGFKQINSNTLRFEMDMVKGLSLETPIKLRLVY

SEQ ID NO: 274 - protein, 223 aa, Borrelia burgdorferi
SNVEIELNDDISGIVSIFVNVNREFEKIRKELLTTLVGEEIANMPLFPVDEIKKYFKNGEEKLGLKLLSIKTQGDSINLVVKFDNLIKILGDYMKKPDISVFKIEKKDGKNIIELNINLENATKNINENKEYISDALAALLPSDEIPMSAKEYKDVLVYFLSDFTSKASELIDNSKLNLVVKTSRNVQEQFGFKQINSNTLRFEMDMVKGLSLETPIKLRLVY

SEQ ID NO: 275 - DNA, 726 bp, Borrelia burgdorferi
atgagaaagtgttttgttagcttgagtttattgttgattttttttgcttgtagctctaatgttgaaattgagttaaatgatgatattagtggtattgtttcaatatttgttaatgttaatagagaatttgaaaaaattagaaaagaactcttaacaactttggtgggagaagaaattgcaaatatgcctctttttcctgtagatgaaataaaaaaatactttaaaaatggagaggaaaagcttgggcttaagcttttgagtattaaaacccaaggagattctattaatttagttgttaagtttgataatttaattaaaattttaggcgattatatgaaaaaacccgatatatctgtgtttaagatagaaaaaaaagatggtaaaaatattattgaacttaatattaatttggaaaacgctactaagaatattaatgaaaataaagaatatattagtgatgcacttgctgctcttttgccatcggatgagatcccaatgtctgccaaagaatataaagatgttttggtttattttttatcggattttacttccaaagcaagtgaacttattgacaattccaaacttaatcttgtagttaagacttctagaaatgttcaagaacaatttggattcaaacaaattaactcaaacacactgcggtttgagatggatatggttaaaggattaagtcttgaaacaccaataaaacttagattagtttattga

SEQ ID NO: 276 - DNA, 672 bp, Borrelia burgdorferi
tctaatgttgaaattgagttaaatgatgatattagtggtattgtttcaatatttgttaatgttaatagagaatttgaaaaaattagaaaagaactcttaacaactttggtgggagaagaaattgcaaatatgcctctttttcctgtagatgaaataaaaaaatactttaaaaatggagaggaaaagcttgggcttaagcttttgagtattaaaacccaaggagattctattaatttagttgttaagtttgataatttaattaaaattttaggcgattatatgaaaaaacccgatatatctgtgtttaagatagaaaaaaaagatggtaaaaatattattgaacttaatattaatttggaaaacgctactaagaatattaatgaaaataaagaatatattagtgatgcacttgctgctcttttgccatcggatgagatcccaatgtctgccaaagaatataaagatgttttggtttattttttatcggattttacttccaaagcaagtgaacttattgacaattccaaacttaatcttgtagttaagacttctagaaatgttcaagaacaatttggattcaaacaaattaactcaaacacactgcggtttgagatggatatggttaaaggattaagtcttgaaacaccaataaaacttagattagtttattga

SEQ ID NO: 277 - protein, 320 aa, Borrelia burgdorferi
MNIRKLLFCIFFMNISFLLFAGDYKGLDFKIKFFNQSIYRVNSNVFIEVSLSNASESVLTLEIGDINSFGFDFDVTDTTNIKVKRPIEYVKKRSKNVAIPVRNMSLRPNEKFSVVINLNQFVKFSKDGVYFVKGIFFPDISDPSKKKESNIITLFLNDGFDENPGSIDLVNLSENNDIQDILKKKKLSPDEIVKYLLKALQLGKKEKFFLYLDIEGLLLNDKGKAYLYKQKLSPIPNKNVVEEYKEYLWNSNNSDISKAPNKFSIIETTYSDTSGKVIADLYFDDGQFYISKRYTFFFKKYDYYWIIYDYIVQNTGIKEK

SEQ ID NO: 278 - protein, 299 aa, Borrelia burgdorferi
GDYKGLDFKIKFFNQSIYRVNSNVFIEVSLSNASESVLTLEIGDINSFGFDFDVTDTTNIKVKRPIEYVKKRSKNVAIPVRNMSLRPNEKFSVVINLNQFVKFSKDGVYFVKGIFFPDISDPSKKKESNIITLFLNDGFDENPGSIDLVNLSENNDIQDILKKKKLSPDEIVKYLLKALQLGKKEKFFLYLDIEGLLLNDKGKAYLYKQKLSPIPNKNVVEEYKEYLWNSNNSDISKAPNKFSIIETTYSDTSGKVIADLYFDDGQFYISKRYTFFFKKYDYYWIIYDYIVQNTGIKEK

SEQ ID NO: 279 - DNA, 963 bp, Borrelia burgdorferi
atgaatattagaaaattgcttttttgtatcttttttatgaatatttcttttcttttgtttgcgggagattacaagggccttgattttaaaatcaagttttttaatcaatctatttatcgtgtcaatagtaatgtttttattgaagtttctcttagtaatgcgtctgagagtgttttaactttagaaataggcgatattaattcttttggctttgattttgatgttactgataccaccaatattaaagttaaaagacctattgaatatgttaaaaagagatctaaaaatgttgcaattcctgttagaaatatgagcttgagacctaatgaaaaattttctgtagttattaacttaaatcaatttgttaagtttagtaaagatggagtttattttgttaagggtatttttttcccagacatttcagatccatctaagaaaaaagaatccaatattattacgctttttttgaatgatggttttgatgaaaatccaggtagcatagaccttgttaatttgtctgaaaataatgatattcaagatatcttgaaaaagaaaaaattatctcccgatgaaattgttaaatatttgttaaaggcattgcagcttgggaaaaaagaaaagttctttttatatcttgatattgaaggtttgttattaaatgacaagggcaaggcatacctttataagcaaaagttatcacctattcccaataaaaatgtagttgaagagtataaagaatatttgtggaattctaataattcggatatttcaaaagcaccaaataaattttctattattgaaactacttattctgatacttctggcaaggtgattgctgatttatattttgacgatgggcaattttatatttccaaaagatatactttcttctttaaaaaatatgattattattggataatttatgattacattgttcaaaatactggcattaaggaaaagtaa

SEQ ID NO: 280 - DNA, 900 bp, Borrelia burgdorferi
ggagattacaagggccttgattttaaaatcaagttttttaatcaatctatttatcgtgtcaatagtaatgtttttattgaagtttctcttagtaatgcgtctgagagtgttttaactttagaaataggcgatattaattcttttggctttgattttgatgttactgataccaccaatattaaagttaaaagacctattgaatatgttaaaaagagatctaaaaatgttgcaattcctgttagaaatatgagcttgagacctaatgaaaaattttctgtagttattaacttaaatcaatttgttaagtttagtaaagatggagtttattttgttaagggtatttttttcccagacatttcagatccatctaagaaaaaagaatccaatattattacgctttttttgaatgatggttttgatgaaaatccaggtagcatagaccttgttaatttgtctgaaaataatgatattcaagatatcttgaaaaagaaaaaattatctcccgatgaaattgttaaatatttgttaaaggcattgcagcttgggaaaaaagaaaagttctttttatatcttgatattgaaggtttgttattaaatgacaagggcaaggcatacctttataagcaaaagttatcacctattcccaataaaaatgtagttgaagagtataaagaatatttgtggaattctaataattcggatatttcaaaagcaccaaataaattttctattattgaaactacttattctgatacttctggcaaggtgattgctgatttatattttgacgatgggcaattttatatttccaaaagatatactttcttctttaaaaaatatgattattattggataatttatgattacattgttcaaaatactggcattaaggaaaagtaa

SEQ ID NO: 281 - protein, 171 aa, Borrelia burgdorferi
MNWLSFFYVLLFLLIFPFELQSNNKENIENLIKLHMLYDLTNNLSKELETINKIKNFDLEQHYLLITKYYLKIKKYKEANDFLKKINQKKIKNQKIKNEIISLKLRINEDNINEEEIKKILNNEKNIDVKIIYQIFSLIKFKNKKLANKIKNIILTNYPKSIYSYKIKRNE

SEQ ID NO: 282 - protein, 149 aa, Borrelia burgdorferi
NNKENIENLIKLHMLYDLTNNLSKELETINKIKNFDLEQHYLLITKYYLKIKKYKEANDFLKKINQKKIKNQKIKNEIISLKLRINEDNINEEEIKKILNNEKNIDVKIIYQIFSLIKFKNKKLANKIKNIILTNYPKSIYSYKIKRNE

SEQ ID NO: 283 - DNA, 516 bp, Borrelia burgdorferi
atgaactggctatcctttttttatgttttattatttttattaatttttccttttgaattacagagtaataataaagaaaatatagaaaatttaataaagctacatatgctttatgatttaaccaataacctgtcaaaagaattagaaacaataaataaaattaaaaattttgacttagaacaacattatctgctaattacaaaatattatctaaaaataaaaaaatataaagaagctaatgattttttaaaaaaaataaaccaaaaaaagatcaaaaatcaaaaaataaaaaacgaaatcatttcgctaaaattaagaataaatgaagataatattaatgaagaagaaatcaaaaaaattttaaataacgaaaaaaatatagatgtcaaaataatttatcaaatattcagtcttataaaatttaaaaataaaaaattagcaaataaaattaaaaacataatactaacaaactatcccaaaagcatttattcttataaaataaaaagaaatgaataa

SEQ ID NO: 284 - DNA, 450 bp, Borrelia burgdorferi
aataataaagaaaatatagaaaatttaataaagctacatatgctttatgatttaaccaataacctgtcaaaagaattagaaacaataaataaaattaaaaattttgacttagaacaacattatctgctaattacaaaatattatctaaaaataaaaaaatataaagaagctaatgattttttaaaaaaaataaaccaaaaaaagatcaaaaatcaaaaaataaaaaacgaaatcatttcgctaaaattaagaataaatgaagataatattaatgaagaagaaatcaaaaaaattttaaataacgaaaaaaatatagatgtcaaaataatttatcaaatattcagtcttataaaatttaaaaataaaaaattagcaaataaaattaaaaacataatactaacaaactatcccaaaagcatttattcttataaaataaaaagaaatgaataa

SEQ ID NO: 285 - protein, 405 aa, Borrelia burgdorferi
MNSIYVIGKLLLTLFLIFFPFCYNLFAVNLAEINKLSEYAKSIVLIDFDTKRILYSKKPNLVFPPASLTKIVTIYTALIEAEKRNIKLKSIVPISDSASYYNAPPNSSLMFLEKGQIVNFEEILKGLSVSSGNDSSIAIAEFVVGNLNSFVNLMNINVLNLGLFNMHFVEPSGYSSENKITALDMAFFVKSYIEKFKFMLNIHSLKYFIYPKSRNLGTALSSKFLNLKQRNANLLIYDYPYSDGIKTGYIKESGLNLVATAKKGERRLIAVVLGVEKGINGFGEKMRSSIAKNLFEYGFNKYSKFPLIVKLKEKVYNGTVDTVALFSKEPFYYILTKDEFDKINISYTVDKLVAPLSGDMPVGRAMIFLENEKIGDVALFSGKVKRLGFWQGLYKSFINLFSREY

SEQ ID NO: 286 - protein, 378 aa, Borrelia burgdorferi
VNLAEINKLSEYAKSIVLIDFDTKRILYSKKPNLVFPPASLTKIVTIYTALIEAEKRNIKLKSIVPISDSASYYNAPPNSSLMFLEKGQIVNFEEILKGLSVSSGNDSSIAIAEFVVGNLNSFVNLMNINVLNLGLFNMHFVEPSGYSSENKITALDMAFFVKSYIEKFKFMLNIHSLKYFIYPKSRNLGTALSSKFLNLKQRNANLLIYDYPYSDGIKTGYIKESGLNLVATAKKGERRLIAVVLGVEKGINGFGEKMRSSIAKNLFEYGFNKYSKFPLIVKLKEKVYNGTVDTVALFSKEPFYYILTKDEFDKINISYTVDKLVAPLSGDMPVGRAMIFLENEKIGDVALFSGKVKRLGFWQGLYKSFINLFSREY

SEQ ID NO: 287 - DNA, 1218 bp, Borrelia burgdorferi
atgaatagtatctatgttattgggaaattgttattaactttatttttaatttttttcccgttttgttataatctttttgcagttaatttagctgagattaataaattatcagagtatgcaaagtcaatagttttaatagattttgatactaagcgaatactttattctaagaagcccaatttggtttttcctccagcatctcttacaaagattgttacaatttatacagctttaattgaagctgaaaagcgaaatataaaattaaaaagcatagttcctattagcgattctgcttcatattataatgcaccccccaattcttctttgatgtttttagaaaaaggtcaaattgttaattttgaagagattttaaaaggactttcagtttcttcgggtaatgattcttctattgcaattgctgagtttgtagtaggcaatttaaatagctttgttaatttaatgaatattaatgttttaaatttagggctttttaatatgcattttgttgaaccttctggatatagcagcgagaataagattacagcactagatatggctttttttgtgaaatcttatatagaaaagtttaaatttatgcttaatattcattctttaaagtattttatttatccaaagagtagaaatttaggaactgctttgtcatcaaaatttttaaacttaaaacaaagaaatgctaatttattaatatatgattacccttattcagatggcattaaaacgggatatattaaggaatcaggcttaaatcttgttgctactgctaaaaagggtgagagaagattaatagcagttgtattgggggttgaaaaaggaattaatggatttggagagaaaatgagatcttcgattgcaaaaaatttatttgaatatggatttaataaatattctaaatttcctttaatagtaaaattaaaagaaaaagtctataatggtacagtggatacagttgctcttttttctaaagagcctttttattatattttaactaaagatgaatttgataaaattaatataagttatactgttgataaattggttgctccacttagtggggatatgcctgttgggagggctatgatttttttagaaaatgaaaaaataggggatgttgctttgtttagtggcaaggtaaaaagattagggttttggcaaggtctttataagagttttataaatcttttttcaagagagtattaa

SEQ ID NO: 288 - DNA, 1137 bp, Borrelia burgdorferi
gttaatttagctgagattaataaattatcagagtatgcaaagtcaatagttttaatagattttgatactaagcgaatactttattctaagaagcccaatttggtttttcctccagcatctcttacaaagattgttacaatttatacagctttaattgaagctgaaaagcgaaatataaaattaaaaagcatagttcctattagcgattctgcttcatattataatgcaccccccaattcttctttgatgtttttagaaaaaggtcaaattgttaattttgaagagattttaaaaggactttcagtttcttcgggtaatgattcttctattgcaattgctgagtttgtagtaggcaatttaaatagctttgttaatttaatgaatattaatgttttaaatttagggctttttaatatgcattttgttgaaccttctggatatagcagcgagaataagattacagcactagatatggctttttttgtgaaatcttatatagaaaagtttaaatttatgcttaatattcattctttaaagtattttatttatccaaagagtagaaatttaggaactgctttgtcatcaaaatttttaaacttaaaacaaagaaatgctaatttattaatatatgattacccttattcagatggcattaaaacgggatatattaaggaatcaggcttaaatcttgttgctactgctaaaaagggtgagagaagattaatagcagttgtattgggggttgaaaaaggaattaatggatttggagagaaaatgagatcttcgattgcaaaaaatttatttgaatatggatttaataaatattctaaatttcctttaatagtaaaattaaaagaaaaagtctataatggtacagtggatacagttgctcttttttctaaagagcctttttattatattttaactaaagatgaatttgataaaattaatataagttatactgttgataaattggttgctccacttagtggggatatgcctgttgggagggctatgatttttttagaaaatgaaaaaataggggatgttgctttgtttagtggcaaggtaaaaagattagggttttggcaaggtctttataagagttttataaatcttttttcaagagagtattaa

SEQ ID NO: 289 - protein, 500 aa, Borrelia burgdorferi
MNSYDFITALVPIILIIIGLGIIKKPAYYVIPISLIATVAIVIFYKNLGIVNTSLAMLEGALMGIWPIATVIIAAIFTYKMSEDQKDIETIKNILSNVSSDRRIIVLLVAWGFGNFLEGVAGYGTAVAIPVSILIAMGFEPFFACLICLIMNTSSTAYGSVGIPITSLAQATNLDVNIVSSEIAFQLILPTLTIPFVLVILTGGGIKGLKGVFLLTLLSGMSMAISQVFISKTLGPELPAILGSILSMTITIVYARFFGNKETTERQSKNTISLSKGIIACSPYILIVTFIVLVSPLFNKIHEYLKTFQSTISIYPEANPLHFKWIISPGFLIILATTISYSIRGVPMLKQLKIFTLTLKKMALSSFIIICIVAISRLMTHSGMIRDLANGISIITGKFGPLFSPLIGAIGTFLTGSDTVSNVLFGPLQTQMAENIGANPYWLAAANTTGATGGKMISPQNITIATTTAGLIGQEGKLLSKTIIYALYYILATGLLVYLV

SEQ ID NO: 290 - protein, 416 aa, Borrelia burgdorferi
QKDIETIKNILSNVSSDRRIIVLLVAWGFGNFLEGVAGYGTAVAIPVSILIAMGFEPFFACLICLIMNTSSTAYGSVGIPITSLAQATNLDVNIVSSEIAFQLILPTLTIPFVLVILTGGGIKGLKGVFLLTLLSGMSMAISQVFISKTLGPELPAILGSILSMTITIVYARFFGNKETTERQSKNTISLSKGIIACSPYILIVTFIVLVSPLFNKIHEYLKTFQSTISIYPEANPLHFKWIISPGFLIILATTISYSIRGVPMLKQLKIFTLTLKKMALSSFIIICIVAISRLMTHSGMIRDLANGISIITGKFGPLFSPLIGAIGTFLTGSDTVSNVLFGPLQTQMAENIGANPYWLAAANTTGATGGKMISPQNITIATTTAGLIGQEGKLLSKTIIYALYYILATGLLVYLV

SEQ ID NO: 291 - DNA, 1503 bp, Borrelia burgdorferi
atgaattcttatgattttataacagctttggtaccaataatcctaataattattggacttggcataataaaaaagccagcttactatgtaatacccatatcattaatagccaccgttgctatagttatattttataaaaacttgggaatagtaaacacaagtcttgcaatgcttgagggcgccttaatggggatatggccaatagcaactgtaattattgctgccatatttacatacaaaatgtcagaagatcaaaaagatatagaaactattaaaaatattttatcaaacgtatcttctgatagaagaattatagtattactagttgcatggggatttggaaattttttagaaggagttgctggatatggaactgctgttgcaattcctgtatcaatattaatagcaatgggatttgaaccattttttgcctgcttaatctgtttaataatgaacacctcatcaaccgcctacggatctgtgggaatccctataacatctttagctcaagcaactaacttggatgttaacattgtttcatctgagattgcattccaactaatacttccaaccttaacaataccttttgtactggtaattcttacaggagggggcattaaaggattaaaaggagtattccttcttaccttactctcaggaatgtcaatggcaatatctcaagtatttatatcaaaaactttgggtccagaacttcctgcaatccttggaagcattctttctatgacaataacaatagtttatgcaaggttttttggaaataaagaaactactgagcgccaaagcaaaaacacaatatccttatcaaaaggaattattgcctgctcaccctacattttaatagtaacttttatagtgcttgtatctcctctttttaacaaaattcatgaatacctaaaaacttttcaaagcactattagcatttatccagaagcaaatcccttacactttaaatggattatctctccgggcttcttgattatacttgcaacaacaatatcctattcaatacggggagttccaatgttaaaacagctaaaaatatttacattaaccttgaaaaaaatggcattatcttcctttataatcatatgcattgttgcaatatcaagattaatgacacatagtggaatgataagagatcttgctaatggaatctcaataataacaggtaaatttggaccattatttagcccactaattggagctattgggacatttttaacaggaagtgatacggtttcaaatgttctttttggacctttacaaacacaaatggcagaaaatattggagcaaatccttactggcttgcagcagcaaatacaacaggagcaactggagggaaaatgatttctccccaaaacatcacaatagcaacaacaactgctggattaattggacaagaaggcaagcttttatcaaaaacaataatttatgctttatactacattttagcaacaggattgctagtttatttagtataa

SEQ ID NO: 292 - DNA, 1171 bp, Borrelia burgdorferi
caaaaagatatagaaactattaaaaatattttatcaaacgtatcttctgatagaagaattatagtattactagttgcatggggatttggaaattttttagaaggagttgctggatatggaactgctgttgcaattcctgtatcaatattaatagcaatgggatttgaaccattttttgcctgcttaatctgtttaataatgaacacctcatcaaccgcctacggatctgtgggaatccctataacatctttagctcaagcaactaacttggatgttaacattgtttcatctgagattgcattccaactaatacttccaaccttaacaataccttttgtactggtaattcttacaggagggggcattaaaggattaaaaggagtattccttcttaccttactctcaggaatgtcaatggcaatatctcaagtatttatatcaaaaactttgggtccagaacttcctgcaatccttggaagcattctttctatgacaataacaatagtttatgcaaggttttttggaaataaagaaactactgagcgccaaagcaaaaacacaatatccttatcaaaaggaattattgcctgctcaccctacattttaatagtaacttttatagtgcttgtatctcctctttttaacaaaattcatgaatacctaaaaacttttcaaagcactattagcatttatccagaagcaaatcccttacactttaaatggattatctctccgggcttcttgattatacttgcaacaacaatatcctattcaatacggggagttccaatgttaaaacagctaaaaatatttacattaaccttgaaaaaaatggcattatcttcctttataatcatatgcattgttgcaatatcaagattaatgacacatagtggaatgataagagatcttgctaatggaatctcaataataacaggtaaatttggaccattatttagcccactaattggagctattgggacatttttaacaggaagtgatacggtttcaaatgttctttttggacctttacaaacacaaatggcagaaaatattggagcaaatccttactggcttgcagcagcaaatacaacaggagcaactggagggaaaatgatttctccccaaaacatcacaatagcaacaacaactgctggattaattggacaag

SEQ ID NO: 293 - protein, 250 aa, Borrelia burgdorferi
MPSPIRVFFLVLLFIFIFNPVLIAMLFILFPFILILFSFLGVFRIYFTRDYSYSRSREFEFYKLSFLLMAKLLSILGTVTGEQLNYVNFIINSLNLSERGKSELYTIFHSAITKNNNADKILYTLKLGYFQHKDLFIWLFATLKEINRLSRYKNLEAEKFISYVGVFLELESDGYEAYKDINIKIVNPYSVLGLTYSASDDEVKKAYKSLVIKYHPDKFANDPVRQKDANDKFIKIQDAYEKICKERNIR

SEQ ID NO: 294 - protein, 206 aa, Borrelia burgdorferi
IYFTRDYSYSRSREFEFYKLSFLLMAKLLSILGTVTGEQLNYVNFIINSLNLSERGKSELYTIFHSAITKNNNADKILYTLKLGYFQHKDLFIWLFATLKEINRLSRYKNLEAEKFISYVGVFLELESDGYEAYKDINIKIVNPYSVLGLTYSASDDEVKKAYKSLVIKYHPDKFANDPVRQKDANDKFIKIQDAYEKICKERNIR

SEQ ID NO: 295 - DNA, 753 bp, Borrelia burgdorferi
atgccaagcccaattagagtgttttttttagtgttgttgtttatttttatttttaatcccgttttaatagcaatgctttttattttatttccttttattttgatattatttagttttttaggtgtttttagaatatactttacaagggattactcatattctagatctagagagtttgaattttataaactttcttttttattaatggctaaattgctatctattttaggaactgtaactggggagcagctaaattatgtcaattttattatcaattctttgaatttgtctgaacgtggtaaatcagaattgtataccatttttcattctgctattactaaaaataataatgctgataaaattttatatacccttaagcttggttattttcagcacaaagatctttttatatggctttttgccactcttaaagaaattaacaggctttctaggtataaaaatttagaagctgaaaaatttatttcttatgttggtgtttttttagaacttgaatctgatggttatgaagcttataaagatattaatattaaaattgtaaatccttatagtgttttggggttaacatatagtgctagcgatgatgaggttaaaaaggcgtataaaagccttgttataaaatatcatcctgataagtttgcaaatgatcctgtaagacaaaaagatgcaaatgataaatttataaaaattcaagatgcttatgaaaaaatttgcaaggaaagaaatataaggtaa

SEQ ID NO: 296 - DNA, 621 bp, Borrelia burgdorferi
atatactttacaagggattactcatattctagatctagagagtttgaattttataaactttcttttttattaatggctaaattgctatctattttaggaactgtaactggggagcagctaaattatgtcaattttattatcaattctttgaatttgtctgaacgtggtaaatcagaattgtataccatttttcattctgctattactaaaaataataatgctgataaaattttatatacccttaagcttggttattttcagcacaaagatctttttatatggctttttgccactcttaaagaaattaacaggctttctaggtataaaaatttagaagctgaaaaatttatttcttatgttggtgtttttttagaacttgaatctgatggttatgaagcttataaagatattaatattaaaattgtaaatccttatagtgttttggggttaacatatagtgctagcgatgatgaggttaaaaaggcgtataaaagccttgttataaaatatcatcctgataagtttgcaaatgatcctgtaagacaaaaagatgcaaatgataaatttataaaaattcaagatgcttatgaaaaaatttgcaaggaaagaaatataaggtaa

SEQ ID NO: 297 - protein, 323 aa, Borrelia burgdorferi
MKKKNLSIYMIMLISLLSCNTSDPNELTRKKMQDKNVKILGFLEKIQADNKEIVEKHIEKKEKQMVQAASVAPINVESNFPYYLQEEIEIKEEELVPNTDEEKKAEKAISDGSLEFAKLVDDENKLKNESAQLESSFNNVYKEILELADLIQAEVHVAGRINSYIKKRKTTKEKEYKKREIKNKIEKQALIKLFNQLLEKRGDIENLHTQLNSGLSERASAKYFFEKAKETLKAAITERLNNKRKNRPWWARRTHSNLAIQAKNEAEDALNQLSTSSFRILEAMKIKEDVKQLLEEVKSFLDSSKSKIFSSGDRLYDFLETSK

SEQ ID NO: 298 - protein, 299 aa, Borrelia burgdorferi
NELTRKKMQDKNVKILGFLEKIQADNKEIVEKHIEKKEKQMVQAASVAPINVESNFPYYLQEEIEIKEEELVPNTDEEKKAEKAISDGSLEFAKLVDDENKLKNESAQLESSFNNVYKEILELADLIQAEVHVAGRINSYIKKRKTTKEKEYKKREIKNKIEKQALIKLFNQLLEKRGDIENLHTQLNSGLSERASAKYFFEKAKETLKAAITERLNNKRKNRPWWARRTHSNLAIQAKNEAEDALNQLSTSSFRILEAMKIKEDVKQLLEEVKSFLDSSKSKIFSSGDRLYDFLETSK

SEQ ID NO: 299 - DNA, 972 bp, Borrelia burgdorferi
atgaaaaaaaaaaatttatcaatttacatgataatgctaataagtttattatcatgtaatacaagtgaccccaatgaattaactcgtaaaaaaatgcaagacaagaacgtgaaaattttaggatttttagagaaaattcaagcagataataaagaaattgttgaaaaacatatagaaaaaaaagaaaaacaaatggtgcaggctgcttctgtagcacctattaatgtagagagtaatttcccatattatcttcaagaagaaatagagataaaagaagaagagttggttccaaatactgatgaagaaaagaaggcagagaaggcaattagcgatgggagtcttgaatttgctaaattagttgatgatgaaaataaacttaaaaatgaatctgcgcaattagaatctagttttaataatgtttataaagaaatcttagaacttgcagatttaatacaagcagaggtgcatgttgcaggaaggataaatagctatataaaaaaaagaaagaccactaaagaaaaagaatataagaagagagaaattaagaataagatagaaaaacaggctctaattaagttgttcaatcagttattagaaaaaagaggcgatattgaaaatcttcatactcaattaaatagtggacttagcgagagagcatctgcaaaatacttttttgagaaagccaaagaaactttaaaagctgctattactgaaagattaaataacaaacgtaaaaatcggccatggtgggcaagaagaacacatagtaatttagcaatacaggcaaaaaatgaggcagaggatgctttaaaccaattaagtacttcttcttttaggatacttgaagcaatgaaaataaaggaagatgtaaaacagcttcttgaagaagtaaaatcttttctagattcttcaaagagcaaaatcttttctagtggcgatagattatatgattttttagagacgagtaaataa

SEQ ID NO: 300 - DNA, 900 bp, Borrelia burgdorferi
aatgaattaactcgtaaaaaaatgcaagacaagaacgtgaaaattttaggatttttagagaaaattcaagcagataataaagaaattgttgaaaaacatatagaaaaaaaagaaaaacaaatggtgcaggctgcttctgtagcacctattaatgtagagagtaatttcccatattatcttcaagaagaaatagagataaaagaagaagagttggttccaaatactgatgaagaaaagaaggcagagaaggcaattagcgatgggagtcttgaatttgctaaattagttgatgatgaaaataaacttaaaaatgaatctgcgcaattagaatctagttttaataatgtttataaagaaatcttagaacttgcagatttaatacaagcagaggtgcatgttgcaggaaggataaatagctatataaaaaaaagaaagaccactaaagaaaaagaatataagaagagagaaattaagaataagatagaaaaacaggctctaattaagttgttcaatcagttattagaaaaaagaggcgatattgaaaatcttcatactcaattaaatagtggacttagcgagagagcatctgcaaaatacttttttgagaaagccaaagaaactttaaaagctgctattactgaaagattaaataacaaacgtaaaaatcggccatggtgggcaagaagaacacatagtaatttagcaatacaggcaaaaaatgaggcagaggatgctttaaaccaattaagtacttcttcttttaggatacttgaagcaatgaaaataaaggaagatgtaaaacagcttcttgaagaagtaaaatcttttctagattcttcaaagagcaaaatcttttctagtggcgatagattatatgattttttagagacgagtaaataa

SEQ ID NO: 301 - protein, 260 aa, Borrelia burgdorferi
MNKKILTLLVLILSISSVLMLSKSITKKSKYKIIRDYFINSNYVLVKIENKDLKFTISKPIYDKKLNNYFFKGQTTSHFLISNNVDIAINTSPYEVKQNMFFPKGLYIYNKKMISKQINNYGEIVIKHNKIILNPKEDEIENCDYGFSGFFVLIKNGKYKKNFKETRHPRTIIGTDKNNKHLFLVTIEGRGVNNSKGASLNEAIDFALSYGMTNAINLDGGGSSTLVVKSNNAPYKLNFTANIFGQERPVPFHLGIKLPN

SEQ ID NO: 302 - protein, 240 aa, Borrelia burgdorferi
LSKSITKKSKYKIIRDYFINSNYVLVKIENKDLKFTISKPIYDKKLNNYFFKGQTTSHFLISNNVDIAINTSPYEVKQNMFFPKGLYIYNKKMISKQINNYGEIVIKHNKIILNPKEDEIENCDYGFSGFFVLIKNGKYKKNFKETRHPRTIIGTDKNNKHLFLVTIEGRGVNNSKGASLNEAIDFALSYGMTNAINLDGGGSSTLVVKSNNAPYKLNFTANIFGQERPVPFHLGIKLPN

SEQ ID NO: 303 - DNA, 783 bp, Borrelia burgdorferi
atgaataaaaaaatattaacactgctagtattgattttaagtatttcatcagtactaatgctgtccaaatcaatcaccaaaaaatccaaatacaaaattattagggattatttcataaacagcaattatgttctggtgaaaattgaaaataaagatctaaaatttaccatatcaaaacctatttacgacaaaaagctaaataattacttctttaaaggccaaacaacaagccatttcttaatttctaacaatgttgacattgcaattaacacaagtccatacgaagttaaacaaaacatgtttttcccaaaaggactatacatatataataaaaaaatgatttcaaaacaaataaataactacggagagattgtaataaagcacaacaaaattatattaaatcccaaggaagacgaaatagaaaactgcgattatggatttagcggattttttgttttaatcaaaaacggaaagtataaaaaaaattttaaagaaacaaggcacccaagaacaataataggaactgataaaaataacaagcatttatttcttgttacaatagaaggaaggggtgtcaataatagcaaaggggcctctcttaatgaagctattgattttgcattaagctacggcatgactaacgctattaatctagacggggggggctcaagcactcttgttgtaaaatcaaataacgctccttacaaattaaacttcacagcaaacatctttggacaggaaagacctgtcccatttcatttaggaataaaacttcctaattga

SEQ ID NO: 304 - DNA, 723 bp, Borrelia burgdorferi
ctgtccaaatcaatcaccaaaaaatccaaatacaaaattattagggattatttcataaacagcaattatgttctggtgaaaattgaaaataaagatctaaaatttaccatatcaaaacctatttacgacaaaaagctaaataattacttctttaaaggccaaacaacaagccatttcttaatttctaacaatgttgacattgcaattaacacaagtccatacgaagttaaacaaaacatgtttttcccaaaaggactatacatatataataaaaaaatgatttcaaaacaaataaataactacggagagattgtaataaagcacaacaaaattatattaaatcccaaggaagacgaaatagaaaactgcgattatggatttagcggattttttgttttaatcaaaaacggaaagtataaaaaaaattttaaagaaacaaggcacccaagaacaataataggaactgataaaaataacaagcatttatttcttgttacaatagaaggaaggggtgtcaataatagcaaaggggcctctcttaatgaagctattgattttgcattaagctacggcatgactaacgctattaatctagacggggggggctcaagcactcttgttgtaaaatcaaataacgctccttacaaattaaacttcacagcaaacatctttggacaggaaagacctgtcccatttcatttaggaataaaacttcctaattga

SEQ ID NO: 305 - protein, 237 aa, Borrelia burgdorferi
MQLLKNKYPFKRALLDLFLVYAIVYLASPFVNVNSEFWNVDENHFYFWISRSFLIIFIIYFFKLTSSYDDFRVEFFIPKFKFIFLWDSVLIFIKTILIAMIVIFLIAFLLEYLLPESVLVYYFQNNAGFNWKISSKKAFFLMTFTSFFTGAFEELFYRAFVITKFTQMGFPVVATAILSSMFFAYGHLYYGILGFLVTFILGIFFAFTYLRYKNVYYVIFIHSFYNIIVSSLLLFLN

SEQ ID NO: 306 - protein, 204 aa, Borrelia burgdorferi
NSEFWNVDENHFYFWISRSFLIIFIIYFFKLTSSYDDFRVEFFIPKFKFIFLWDSVLIFIKTILIAMIVIFLIAFLLEYLLPESVLVYYFQNNAGFNWKISSKKAFFLMTFTSFFTGAFEELFYRAFVITKFTQMGFPVVATAILSSMFFAYGHLYYGILGFLVTFILGIFFAFTYLRYKNVYYVIFIHSFYNIIVSSLLLFLN

SEQ ID NO: 307 - DNA, 714 bp, Borrelia burgdorferi
atgcaattgttaaaaaataaatatccattcaagcgggctttgcttgatctttttttggtctatgctattgtttatttggcatctccttttgtaaatgttaattcagaattttggaatgttgatgaaaatcatttttatttttggatttcaagatcttttttaattatttttataatttatttttttaaacttaccagttcttatgatgattttagagtagagttttttattcctaaatttaaatttatttttctttgggattctgttttaatttttattaaaacaatattgattgcaatgatagtcatttttttaatagcttttttgcttgaatatttgttgccagaatcggtacttgtctattattttcaaaacaatgctggatttaattggaagattagcagtaaaaaagcattttttttaatgacttttacctctttttttacaggagcttttgaagaacttttttacagggcttttgttattactaagtttacacaaatgggatttcctgttgtagctaccgccattcttagtagtatgttttttgcttatgggcatttatattatggaattttaggatttttggttacatttatattagggatattttttgcttttacttatttaaggtataaaaatgtatattatgtgatttttatacatagtttttataatattattgttagcagcttgttgctttttttgaattaa

SEQ ID NO: 308 - DNA, 615 bp, Borrelia burgdorferi
aattcagaattttggaatgttgatgaaaatcatttttatttttggatttcaagatcttttttaattatttttataatttatttttttaaacttaccagttcttatgatgattttagagtagagttttttattcctaaatttaaatttatttttctttgggattctgttttaatttttattaaaacaatattgattgcaatgatagtcatttttttaatagcttttttgcttgaatatttgttgccagaatcggtacttgtctattattttcaaaacaatgctggatttaattggaagattagcagtaaaaaagcattttttttaatgacttttacctctttttttacaggagcttttgaagaacttttttacagggcttttgttattactaagtttacacaaatgggatttcctgttgtagctaccgccattcttagtagtatgttttttgcttatgggcatttatattatggaattttaggatttttggttacatttatattagggatattttttgcttttacttatttaaggtataaaaatgtatattatgtgatttttatacatagtttttataatattattgttagcagcttgttgctttttttgaattaa

SEQ ID NO: 309 - protein, 181 aa, Borrelia burgdorferi
MKKYLFFILFLISSNNLIVSYPLSFGGGFSYQFTNYTDKTGATKFAPNFTRADHGINLNLFFDANYVLFEMSYKEAFVVTHNGRYFSLGLYGTYPMVFKEQVRMLFPLIGFKYAFDLSSNNFNLFFLSMGLAADLFIPDLDGLYIRPLFMLSISPFSNYKNFSGLTTEIMLGFNIGWRFFN

SEQ ID NO: 310 - protein, 164 aa, Borrelia burgdorferi
IVSYPLSFGGGFSYQFTNYTDKTGATKFAPNFTRADHGINLNLFFDANYVLFEMSYKEAFVVTHNGRYFSLGLYGTYPMVFKEQVRMLFPLIGFKYAFDLSSNNFNLFFLSMGLAADLFIPDLDGLYIRPLFMLSISPFSNYKNFSGLTTEIMLGFNIGWRFFN

SEQ ID NO: 311 - DNA, 546 bp, Borrelia burgdorferi
atgaagaaatatcttttttttattttatttctcatctcttctaataatttaattgtttcttatccactttcttttggtggaggtttttcttatcaatttactaattatactgataaaacaggcgccactaaatttgctccaaattttaccagagcagatcatgggattaatttgaatttattttttgatgcaaattatgtactttttgaaatgtcttacaaagaggcttttgttgttactcacaatgggagatatttctcgcttgggctttatggaacatatccaatggttttcaaagagcaggttagaatgcttttcccattaattgggtttaaatatgcttttgatttaagctctaataacttcaatctcttttttttaagcatggggcttgctgctgatctttttattcccgatcttgatggtttatatattaggcctttgtttatgctttctatttctccattttctaattataaaaatttttctgggttaacaactgagattatgcttggatttaatatcggttggagatttttcaattag

SEQ ID NO: 312 - DNA, 495 bp, Borrelia burgdorferi
attgtttcttatccactttcttttggtggaggtttttcttatcaatttactaattatactgataaaacaggcgccactaaatttgctccaaattttaccagagcagatcatgggattaatttgaatttattttttgatgcaaattatgtactttttgaaatgtcttacaaagaggcttttgttgttactcacaatgggagatatttctcgcttgggctttatggaacatatccaatggttttcaaagagcaggttagaatgcttttcccattaattgggtttaaatatgcttttgatttaagctctaataacttcaatctcttttttttaagcatggggcttgctgctgatctttttattcccgatcttgatggtttatatattaggcctttgtttatgctttctatttctccattttctaattataaaaatttttctgggttaacaactgagattatgcttggatttaatatcggttggagatttttcaattag

SEQ ID NO: 313 - protein, 349 aa, Borrelia burgdorferi
MKQKYENYFKKRLILNLLIFLLLACSSESIFSQLGNLQKIKHEYNILGSSSPRGISLVGETLYIAAMHLFKKENGKIEKIDLSNSYEFINDIVNISGKTYLLAQNKEEELEVCELNGKDWTLKFKKPLKAYKFLKSVGRDGVKEAYILAIDKNNREKIFDLQGSDKTPPQATENDKFYQISNEENLITGNSLKIWQMNNNTYTNIDYQQAKEIMPIIKTSIRGSSEVLVMTGGYNNLDTKFKVYSNTNNYTTPIFIQDEVGEFSSYFAREFNDAILIGSNNGFAEFTKNKEGIFALRAPSKSVEPGAYNGSQLSKTGLNDIIPVSNNTIYILTQGKGLWKLENRKLTKE

SEQ ID NO: 314 - protein, 325 aa, Borrelia burgdorferi
CSSESIFSQLGNLQKIKHEYNILGSSSPRGISLVGETLYIAAMHLFKKENGKIEKIDLSNSYEFINDIVNISGKTYLLAQNKEEELEVCELNGKDWTLKFKKPLKAYKFLKSVGRDGVKEAYILAIDKNNREKIFDLQGSDKTPPQATENDKFYQISNEENLITGNSLKIWQMNNNTYTNIDYQQAKEIMPIIKTSIRGSSEVLVMTGGYNNLDTKFKVYSNTNNYTTPIFIQDEVGEFSSYFAREFNDAILIGSNNGFAEFTKNKEGIFALRAPSKSVEPGAYNGSQLSKTGLNDIIPVSNNTIYILTQGKGLWKLENRKLTKE

SEQ ID NO: 315 - DNA, 1050 bp, Borrelia burgdorferi
atgaaacaaaaatacgaaaactattttaaaaaaagattaattttaaacctattaatatttttactactagcatgctcaagcgaatccatattttcacaattaggaaatctgcaaaaaataaaacatgaatacaatattttgggcagttcaagtccaagaggaatttctctagtaggagaaactctctacattgcagccatgcatttatttaaaaaagaaaacggcaagattgaaaaaattgatttgagcaattcttatgagtttataaacgacattgtaaatatatctggaaaaacctatcttttagcgcaaaacaaagaagaagaattagaagtttgcgagctaaatggaaaagattggacattaaaatttaaaaaaccgctaaaagcatataaattcttaaaatccgtaggaagagatggcgtaaaagaagcatatattttagctatagataaaaataatcgtgagaaaatttttgatctacaaggatctgacaaaacaccaccacaagctactgaaaatgacaaattttatcaaatatcaaatgaagaaaacttaattacaggaaattcactcaaaatatggcaaatgaataacaatacatacacaaacatagactatcaacaggccaaagaaataatgcctatcattaaaacaagcattaggggctcttctgaagttttagtaatgactggtggttacaataatttagatacaaaatttaaagtttactcaaatacaaataattacacaacgccaatatttattcaagacgaagtaggcgaatttagcagctactttgcaagagaatttaatgatgcgatattaatcggaagtaataatggatttgcagaatttacaaaaaataaagaaggaatttttgccctacgggcaccctcaaaatctgtagaacctggagcttataacggatctcagctaagcaaaacaggccttaatgatattattcctgtatcaaacaacacgatttacatattaactcagggcaagggtttgtggaaattggaaaacagaaaattaactaaagaataa

SEQ ID NO: 316 - DNA, 978 bp, Borrelia burgdorferi
tgctcaagcgaatccatattttcacaattaggaaatctgcaaaaaataaaacatgaatacaatattttgggcagttcaagtccaagaggaatttctctagtaggagaaactctctacattgcagccatgcatttatttaaaaaagaaaacggcaagattgaaaaaattgatttgagcaattcttatgagtttataaacgacattgtaaatatatctggaaaaacctatcttttagcgcaaaacaaagaagaagaattagaagtttgcgagctaaatggaaaagattggacattaaaatttaaaaaaccgctaaaagcatataaattcttaaaatccgtaggaagagatggcgtaaaagaagcatatattttagctatagataaaaataatcgtgagaaaatttttgatctacaaggatctgacaaaacaccaccacaagctactgaaaatgacaaattttatcaaatatcaaatgaagaaaacttaattacaggaaattcactcaaaatatggcaaatgaataacaatacatacacaaacatagactatcaacaggccaaagaaataatgcctatcattaaaacaagcattaggggctcttctgaagttttagtaatgactggtggttacaataatttagatacaaaatttaaagtttactcaaatacaaataattacacaacgccaatatttattcaagacgaagtaggcgaatttagcagctactttgcaagagaatttaatgatgcgatattaatcggaagtaataatggatttgcagaatttacaaaaaataaagaaggaatttttgccctacgggcaccctcaaaatctgtagaacctggagcttataacggatctcagctaagcaaaacaggccttaatgatattattcctgtatcaaacaacacgatttacatattaactcagggcaagggtttgtggaaattggaaaacagaaaattaactaaagaataa

SEQ ID NO: 317 - protein, 217 aa, Borrelia burgdorferi
MQSGLKIKLILFFCCFACSCDINYPEIKELDYKINYYFTENRLDYSMSFDFAIKVINSKDVFKLSIENKNTNEFIQVINNNYSSFFIDSSLGKDILYCKDLRFNFFDKTFEDFTSCVRLFDKGMRVYNRELVISLGMSKYDLDDVHNYVYKSKDMEMLNKLSNSKVFFVKTYKDKLHPVSSVVRIDSIDILEIDKAFDNYISFYYVEKNSNLFFKVG

SEQ ID NO: 318 - protein, 204 aa, Borrelia burgdorferi
CCFACSCDINYPEIKELDYKINYYFTENRLDYSMSFDFAIKVINSKDVFKLSIENKNTNEFIQVINNNYSSFFIDSSLGKDILYCKDLRFNFFDKTFEDFTSCVRLFDKGMRVYNRELVISLGMSKYDLDDVHNYVYKSKDMEMLNKLSNSKVFFVKTYKDKLHPVSSVVRIDSIDILEIDKAFDNYISFYYVEKNSNLFFKVG

SEQ ID NO: 319 - DNA, 654 bp, Borrelia burgdorferi
atgcagagcggattaaaaattaaattaatattgtttttttgttgttttgcttgttcttgcgacataaattatccggagataaaagagcttgattataagataaattattattttactgaaaatcgcttagattactctatgagttttgattttgcaattaaagttataaattcaaaagatgtttttaaattatcaatagagaataagaacactaatgagtttattcaagtgattaataataattatagctctttttttattgattctagccttggaaaggatattctatattgtaaggatttgaggtttaatttttttgataaaacttttgaagattttacctcatgtgttcgtctttttgataagggcatgagagtatacaatagagagcttgttatttctttgggtatgtcaaaatatgatttagatgatgttcacaattatgtatataagtctaaagatatggaaatgttaaacaagttaagcaattccaaagtattttttgttaaaacttataaagacaaactacatccggtctcttcagttgttagaattgattcaatagatattctagagattgataaagcatttgataattacataagtttttattatgtcgaaaaaaattcaaatcttttttttaaagttggctga

SEQ ID NO: 320 - DNA, 615 bp, Borrelia burgdorferi
tgttgttttgcttgttcttgcgacataaattatccggagataaaagagcttgattataagataaattattattttactgaaaatcgcttagattactctatgagttttgattttgcaattaaagttataaattcaaaagatgtttttaaattatcaatagagaataagaacactaatgagtttattcaagtgattaataataattatagctctttttttattgattctagccttggaaaggatattctatattgtaaggatttgaggtttaatttttttgataaaacttttgaagattttacctcatgtgttcgtctttttgataagggcatgagagtatacaatagagagcttgttatttctttgggtatgtcaaaatatgatttagatgatgttcacaattatgtatataagtctaaagatatggaaatgttaaacaagttaagcaattccaaagtattttttgttaaaacttataaagacaaactacatccggtctcttcagttgttagaattgattcaatagatattctagagattgataaagcatttgataattacataagtttttattatgtcgaaaaaaattcaaatcttttttttaaagttggctga

SEQ ID NO: 321 - protein, 1119 aa, Borrelia burgdorferi
  SITE (573): Xaa equals any of the naturally occurring L-amino acids
  SITE (627): Xaa equals any of the naturally occurring L-amino acids
  SITE (735): Xaa equals any of the naturally occurring L-amino acids
MNKKHTNFSVLLLLIFLLILSFGGFGYYIYQSKLNDKNREIMLNEVKNSVIDRNYKKAYSVAKLLQDKYPQNEDIAMLTNTLAEIANSSPFESKDLQRDSANQILDKIKGQDNTKTNVNENFDIAFNNRYIKDSTITENYSDRNDDVGIEDEDISEFKKSKIPEKIKPNTNPKEEDQIIQSPNPKLSVNDQKNLFNLEKLKKNLSGKSNSENILNDSQKIENDKQNTNLSKEKNSENILKTPDNSKYSNNNNTTSLKKISSNSQKESELSPPSQTIIGKIYRPYSYLIKKELYEILDDINTGRVTLGKNRLKELIKKGLSNKFQKVNELIENSKNKEASNLLLTLIKKDIEPNLINIPKDPYKKEIFQLDKEDKKPQYLEDLKSKVHSIKPIDLENTKSRQQAIKDLNEFLKNNPNDAQASKTLAQANKIQHLEDLKSKVHSIKPIDLENTKSRQQAIKDLNEFLKNNPNDAQASKTLAQANKIQHLEDLKSKVHSIKPIDLENTKSRQQAIKDLNEFLKNNPNDAQASKTLAQANKIQHLEDLKSKVHSIKPIDLENTKSRQQAIKDLNEFXKNNPNDAQASKTLAQANKIQHLEDLKSKVHSIKPIDLENTKSRQQAIKDLNEFXKNNPNDAQASKTLAQANKIQHLEDLKSKVHSIKPIDLENTKSRQQAIKDLNEFLKNNPNDAQASKTLAQANKIQHLEDLKSKVHSIKPIDLENTKSRQQAIKDLNEFXKNNPNDAQASKTLAQAYENNGDLLKAENAYEKIIKLTNTQEDHYKLGIIRFKLKKYEHSIESFDQTIKLDPKHKKALHNKGIALMMLNKNKKAIESFEKAIQIDKNYGTAYYQKGIAEEKNGDMQQAFASFKNAYNLDKNPNYALKAGIVSNNLGNFKQSEEYLNFFNANAKKPNEIAIYNLSIAKFENNKLEESLETINKAIDLNPEKSEYLYLKASINLKKENYQNAISLYSLVIEKNPENTSAYINLAKAYEKSGNKSQAISTLEKIINKNNKLALNNLGILYKKEKNYQKAIEIFEKAIINSDIEAKYNLATTLIEINDNTRAKDLLREYTKLKPNNPEALHALGIIEYNENNNDQTLRELIKKFPNYKKNENIKKIIGI

SEQ ID NO: 322 - protein, 1087 aa, Borrelia burgdorferi
  SITE (541): Xaa equals any of the naturally occurring L-amino acids
  SITE (595): Xaa equals any of the naturally occurring L-amino acids
  SITE (703): Xaa equals any of the naturally occurring L-amino acids
KLNDKNREIMLNEVKNSVIDRNYKKAYSVAKLLQDKYPQNEDIAMLTNTLAEIANSSPFESKDLQRDSANQILDKIKGQDNTKTNVNENFDIAFNNRYIKDSTITENYSDRNDDVGIEDEDISEFKKSKIPEKIKPNTNPKEEDQIIQSPNPKLSVNDQKNLFNLEKLKKNLSGKSNSENILNDSQKIENDKQNTNLSKEKNSENILKTPDNSKYSNNNNTTSLKKISSNSQKESELSPPSQTIIGKIYRPYSYLIKKELYEILDDINTGRVTLGKNRLKELIKKGLSNKFQKVNELIENSKNKEASNLLLTLIKKDIEPNLINIPKDPYKKEIFQLDKEDKKPQYLEDLKSKVHSIKPIDLENTKSRQQAIKDLNEFLKNNPNDAQASKTLAQANKIQHLEDLKSKVHSIKPIDLENTKSRQQAIKDLNEFLKNNPNDAQASKTLAQANKIQHLEDLKSKVHSIKPIDLENTKSRQQAIKDLNEFLKNNPNDAQASKTLAQANKIQHLEDLKSKVHSIKPIDLENTKSRQQAIKDLNEFXKNNPNDAQASKTLAQANKIQHLEDLKSKVHSIKPIDLENTKSRQQAIKDLNEFXKNNPNDAQASKTLAQANKIQHLEDLKSKVHSIKPIDLENTKSRQQAIKDLNEFLKNNPNDAQASKTLAQANKIQHLEDLKSKVHSIKPIDLENTKSRQQAIKDLNEFXKNNPNDAQASKTLAQAYENNGDLLKAENAYEKIIKLTNTQEDHYKLGIIRFKLKKYEHSIESFDQTIKLDPKHKKALHNKGIALMMLNKNKKAIESFEKAIQIDKNYGTAYYQKGIAEEKNGDMQQAFASFKNAYNLDKNPNYALKAGIVSNNLGNFKQSEEYLNFFNANAKKPNEIAIYNLSIAKFENNKLEESLETINKAIDLNPEKSEYLYLKASINLKKENYQNAISLYSLVIEKNPENTSAYINLAKAYEKSGNKSQAISTLEKIINKNNKLALNNLGILYKKEKNYQKAIEIFEKAIINSDIEAKYNLATTLIEINDNTRAKDLLREYTKLKPNNPEALHALGIIEYNENNNDQTLRELIKKFPNYKKNENIKKIIGI

SEQ ID NO: 323 - DNA, 3354 bp, Borrelia burgdorferi
atgaataaaaaacatacaaatttttcggtattattgcttttaattttcttacttatcttatcatttgggggctttggttactatatatatcaaagcaaattaaatgacaaaaatcgagaaataatgctaaacgaagttaaaaatagcgtaatagatcgaaactataaaaaagcatattctgttgcaaaacttctgcaagacaaatacccccaaaatgaagacattgcaatgcttacaaatacactagcagaaattgccaacagtagtccttttgaatcaaaagacttgcaaagagattctgctaatcaaatcttagacaagatcaaaggtcaagacaatacaaaaacaaatgtaaacgaaaattttgatatagcatttaataatagatacattaaagacagcacaataacagaaaactactctgacagaaacgatgatgttggcattgaagatgaagacatatctgaatttaaaaaaagcaaaatcccagaaaaaataaaaccaaatacaaacccaaaagaagaagaccaaataatacaatctccaaatccgaaattaagtgttaatgaccaaaaaaatttatttaatttggaaaaactaaaaaaaaatttaagtggaaaatcaaatagtgaaaatattttaaacgattctcaaaaaatagaaaatgataagcaaaacacaaatttatccaaagaaaaaaattcggagaatattttaaaaactccggacaacagtaaatattcaaacaataacaatactacatctttaaaaaaaatttcttcaaattcccaaaaagaaagtgagctttctccacccagtcaaacaataatagggaaaatttataggccatatagctacttgataaaaaaagagctctatgaaatattagacgatattaataccggaagagtcacacttggaaaaaacagattaaaagaattaattaaaaaaggtctaagcaacaaatttcaaaaagtaaatgaattgattgaaaattcaaaaaataaagaagcttcaaatttactattaaccttaataaaaaaagatattgaaccaaatctcattaatataccaaaagatccttacaaaaaagaaatttttcaattagataaagaagacaaaaagcctcagtacctagaggaccttaaatctaaagttcattcaataaaacccattgatcttgaaaacacaaaatcacgccaacaagccattaaggatctaaacgaattcttgaaaaacaatcccaatgacgctcaggcctctaaaactttagctcaagctaataaaatacaacacctagaggaccttaaatctaaggttcattcaataaaacccattgatcttgaaaacacaaaatcacgccaacaagccattaaggatctaaacgaattcttgaaaaacaatcccaatgacgctcaggcctctaaaactttagctcaagctaataaaatacaacacctagaggaccttaaatctaaggttcattcaataaaacccattgatcttgaaaacacaaaatcacgccaacaagccattaaggatctaaacgaattcttaaaaaacaatcccaatgacgcccaggcctctaaaactttagctcaagctaataaaatacaacacctggaggaccttaaatctaaggttcattcaataaaacccattgatcttgaaaacacaaaatcacgccaacaagccattaaggatctaaacgaattcttaaaaacaatcccaatgacgccaggcctctaaaactttagctcaagctaataaaatacaacacctgaggaccttaaatctaaggttcattcaataaaacccattgatcttgaaaacacaaaatcacgccaacaagccattaaggatctaaacgaattcttaaaaacaatcccaatgacgccaggcctctaaaactttagctcaagctaataaaatacaacacctagaggaccttaaatctaaggttcattcaataaaacccattgatcttgaaaacacaaaatcacgccaacaagccattaaggatctaaacgaattcttaaaaaacaatcccaatgacgcccaggcctctaaaactttagctcaagctaataaaatacaacacctggaggaccttaaatctaaggttcattcaataaaacccattgatcttgaaaacacaaaatcacgccaacaagccattaaggatctaaacgaattcttaaaaacaatcccaatgacgcccaggcctctaaaactttagctcaagcttatgaaaacaatggagatttgctaaaagcagaaaatgcatacgaaaaaattatcaaactcacaaatacccaagaagatcactataaacttggaatcattagattcaagcttaaaaagtatgaacactcaatagaatcatttgatcaaacaataaaactcgacccaaaacataaaaaagcacttcataacaaaggaatagctttaatgatgctaaataaaaacaaaaaagcaatagaatcttttgagaaagcaatacaaattgataaaaattatggcaccgcctactaccaaaaaggaatagcagaagaaaaaaatggcgatatgcaacaagcatttgcaagctttaaaaatgcctacaatctcgacaaaaaccccaattatgcattaaaagcaggaatagtatcaaataacttgggcaacttcaaacaaagtgaagagtatttaaatttttttaatgccaatgcaaaaaaacctaacgaaattgctatttacaacctatcaatagcaaaatttgaaaacaataaacttgaagaatctcttgaaacaataaacaaagccatagatttaaatccagaaaaaagtgaatatttatatttaaaagcatctataaatcttaaaaaagaaaattaccaaaatgctatatcactttacagcttagtaattgaaaaaaaccctgaaaatacttcagcctatataaacctggcaaaagcatatgaaaaatcaggaaataaaagtcaagcaatctcaactcttgaaaagataataaacaaaaataataaattagccttaaacaatcttgggatactttacaaaaaagaaaaaaattatcaaaaagcaattgaaatttttgaaaaagcaataatcaattcagatattgaagcaaaatataatcttgcaaccactctaattgaaattaatgataacacaagagctaaagaccttctaagagaatatacaaaattaaaaccaaacaatccagaggccttacatgcactaggaataatagaatataatgaaaataacaatgatcaaacactaagagaacttataaaaaaatttccaaattacaaaaaaaatgaaaatattaaaaaaataataggaatataa

SEQ ID NO: 324 - DNA, 3258 bp, Borrelia burgdorferi
aaattaaatgacaaaaatcgagaaataatgctaaacgaagttaaaaatagcgtaatagatcgaaactataaaaaagcatattctgttgcaaaacttctgcaagacaaatacccccaaaatgaagacattgcaatgcttacaaatacactagcagaaattgccaacagtagtccttttgaatcaaaagacttgcaaagagattctgctaatcaaatcttagacaagatcaaaggtcaagacaatacaaaaacaaatgtaaacgaaaattttgatatagcatttaataatagatacattaaagacagcacaataacagaaaactactctgacagaaacgatgatgttggcattgaagatgaagacatatctgaatttaaaaaaagcaaaatcccagaaaaaataaaaccaaatacaaacccaaaagaagaagaccaaataatacaatctccaaatccgaaattaagtgttaatgaccaaaaaaatttatttaatttggaaaaactaaaaaaaaatttaagtggaaaatcaaatagtgaaaatattttaaacgattctcaaaaaatagaaaatgataagcaaaacacaaatttatccaaagaaaaaaattcggagaatattttaaaaactccggacaacagtaaatattcaaacaataacaatactacatctttaaaaaaaatttcttcaaattcccaaaaagaaagtgagctttctccacccagtcaaacaataatagggaaaatttataggccatatagctacttgataaaaaaagagctctatgaaatattagacgatattaataccggaagagtcacacttggaaaaaacagattaaaagaattaattaaaaaaggtctaagcaacaaatttcaaaaagtaaatgaattgattgaaaattcaaaaaataaagaagcttcaaatttactattaaccttaataaaaaaagatattgaaccaaatctcattaatataccaaaagatccttacaaaaaagaaatttttcaattagataaagaagacaaaaagcctcagtacctagaggaccttaaatctaaagttcattcaataaaacccattgatcttgaaaacacaaaatcacgccaacaagccattaaggatctaaacgaattcttgaaaaacaatcccaatgacgctcaggcctctaaaactttagctcaagctaataaaatacaacacctagaggaccttaaatctaaggttcattcaataaaacccattgatcttgaaaacacaaaatcacgccaacaagccattaaggatctaaacgaattcttgaaaaacaatcccaatgacgctcaggcctctaaaactttagctcaagctaataaaatacaacacctagaggaccttaaatctaaggttcattcaataaaacccattgatcttgaaaacacaaaatcacgccaacaagccattaaggatctaaacgaattcttaaaaaacaatcccaatgacgcccaggcctctaaaactttagctcaagctaataaaatacaacacctggaggaccttaaatctaaggttcattcaataaaacccattgatcttgaaaacacaaaatcacgccaacaagccattaaggatctaaacgaattcttaaaaacaatcccaatgacgccaggcctctaaaactttagctcaagctaataaaatacaacacctgaggaccttaaatctaaggttcattcaataaaacccattgatcttgaaaacacaaaatcacgccaacaagccattaaggatctaaacgaattcttaaaaacaatcccaatgacgccaggcctctaaaactttagctcaagctaataaaatacaacacctagaggaccttaaatctaaggttcattcaataaaacccattgatcttgaaaacacaaaatcacgccaacaagccattaaggatctaaacgaattcttaaaaaacaatcccaatgacgcccaggcctctaaaactttagctcaagctaataaaatacaacacctggaggaccttaaatctaaggttcattcaataaaacccattgatcttgaaaacacaaaatcacgccaacaagccattaaggatctaaacgaattcttaaaaacaatcccaatgacgcccaggcctctaaaactttagctcaagcttatgaaaacaatggagatttgctaaaagcagaaaatgcatacgaaaaaattatcaaactcacaaatacccaagaagatcactataaacttggaatcattagattcaagcttaaaaagtatgaacactcaatagaatcatttgatcaaacaataaaactcgacccaaaacataaaaaagcacttcataacaaaggaatagctttaatgatgctaaataaaaacaaaaaagcaatagaatcttttgagaaagcaatacaaattgataaaaattatggcaccgcctactaccaaaaaggaatagcagaagaaaaaaatggcgatatgcaacaagcatttgcaagctttaaaaatgcctacaatctcgacaaaaaccccaattatgcattaaaagcaggaatagtatcaaataacttgggcaacttcaaacaaagtgaagagtatttaaatttttttaatgccaatgcaaaaaaacctaacgaaattgctatttacaacctatcaatagcaaaatttgaaaacaataaacttgaagaatctcttgaaacaataaacaaagccatagatttaaatccagaaaaaagtgaatatttatatttaaaagcatctataaatcttaaaaaagaaaattaccaaaatgctatatcactttacagcttagtaattgaaaaaaaccctgaaaatacttcagcctatataaacctggcaaaagcatatgaaaaatcaggaaataaaagtcaagcaatctcaactcttgaaaagataataaacaaaaataataaattagccttaaacaatcttgggatactttacaaaaaagaaaaaaattatcaaaaagcaattgaaatttttgaaaaagcaataatcaattcagatattgaagcaaaatataatcttgcaaccactctaattgaaattaatgataacacaagagctaaagaccttctaagagaatatacaaaattaaaaccaaacaatccagaggccttacatgcactaggaataatagaatataatgaaaataacaatgatcaaacactaagagaacttataaaaaaatttccaaattacaaaaaaaatgaaaatattaaaaaaataataggaatataa

SEQ ID NO: 325 - protein, 255 aa, Borrelia burgdorferi
MRIYLFLNKNYKIFILFLILILNSKLAYSQRLIRIGKEEMKNKNYIQAIETLSDAIKKYPKVQLGYYFLSIAYRENNQLTEAEGALLDGIAVGGEIDYILYYELGNIMFNRGEGYYPLAIKYYSNSIKSRPNYDSALLNRANAYVQQGKITSKEKEYQKAWDSYTMAIHDYSQFITLRSKTEKKDSILLIISYLRNEKINLEQLDKSLKGRTEHIVYAKEDKNQILKDSFKDNLETNSLIELEKLNWQEELYIDE

SEQ ID NO: 326 - protein, 228 aa, Borrelia burgdorferi
YSQRLIRIGKEEMKNKNYIQAIETLSDAIKKYPKVQLGYYFLSIAYRENNQLTEAEGALLDGIAVGGEIDYILYYELGNIMFNRGEGYYPLAIKYYSNSIKSRPNYDSALLNRANAYVQQGKITSKEKEYQKAWDSYTMAIHDYSQFITLRSKTEKKDSILLIISYLRNEKINLEQLDKSLKGRTEHIVYAKEDKNQILKDSFKDNLETNSLIELEKLNWQEELYIDE

SEQ ID NO: 327 - DNA, 768 bp, Borrelia burgdorferi
atgaggatttatttatttttaaataaaaattacaagatttttattttatttttaattttaatattaaattcaaaattggcatattctcaaaggctaattagaattggcaaagaagagatgaaaaacaaaaattacattcaagcaatcgaaacactaagtgatgctattaaaaaatatccaaaagtacaactcggctattactttttatcaatagcatacagagaaaataatcaactaacagaagcagaaggagcattgctcgatggaattgcagtagggggtgaaatcgactacatactatattatgaattaggcaacataatgtttaacagaggggaaggttactatcctttagcaataaaatattattctaattctattaaaagtagacctaattatgacagtgcgctactaaacagagctaatgcctatgttcaacagggcaaaataacttctaaagaaaaagaataccaaaaagcttgggactcttatactatggctatccacgactactctcaatttattacccttagatcaaaaacagaaaaaaaagacagcattttgcttataataagctatttaagaaatgaaaaaattaatcttgaacaacttgacaaaagtttgaaggggcgaaccgagcatattgtatacgcaaaagaagataaaaatcaaatacttaaagatagttttaaagacaacctagaaacaaattctttaattgagctagaaaaacttaattggcaagaggagttatacatagatgaataa

SEQ ID NO: 328 - DNA, 687 bp, Borrelia burgdorferi
tattctcaaaggctaattagaattggcaaagaagagatgaaaaacaaaaattacattcaagcaatcgaaacactaagtgatgctattaaaaaatatccaaaagtacaactcggctattactttttatcaatagcatacagagaaaataatcaactaacagaagcagaaggagcattgctcgatggaattgcagtagggggtgaaatcgactacatactatattatgaattaggcaacataatgtttaacagaggggaaggttactatcctttagcaataaaatattattctaattctattaaaagtagacctaattatgacagtgcgctactaaacagagctaatgcctatgttcaacagggcaaaataacttctaaagaaaaagaataccaaaaagcttgggactcttatactatggctatccacgactactctcaatttattacccttagatcaaaaacagaaaaaaaagacagcattttgcttataataagctatttaagaaatgaaaaaattaatcttgaacaacttgacaaaagtttgaaggggcgaaccgagcatattgtatacgcaaaagaagataaaaatcaaatacttaaagatagttttaaagacaacctagaaacaaattctttaattgagctagaaaaacttaattggcaagaggagttatacatagatgaataa

SEQ ID NO: 329 - protein, 323 aa, Borrelia burgdorferi
MKFIINLLLSTIKIITFTVIVCLTILSIFQPIYILKENEISITTRLGKIQRTENLAGLKYKIPLIENVQIFPKIILRWDGEPQRIPTGGEEKQLIWIDTTARWKIADINKFYTTIKTMSRAYVRIDAAIEPAVRGVIAKYPLLEIIRSSNDPIQRLSNGILTPQETKINGIYKITKGRKIIEKEIIRIANNNTKDIGIEIVDVLIRKVTYDPSLIESVNNRMISERQQIAEEQRSIGLAEKTEILGSIEKEKLKILSEAKATAAKIKAEGDREAAKIYSNAYGKNIEFYKFWQALESYKAVLKDKRKIFSTDMDFFQYLHKRN

SEQ ID NO: 330 - protein, 296 aa, Borrelia burgdorferi
IFQPIYILKENEISITTRLGKIQRTENLAGLKYKIPLIENVQIFPKIILRWDGEPQRIPTGGEEKQLIWIDTTARWKIADINKFYTTIKTMSRAYVRIDAAIEPAVRGVIAKYPLLEIIRSSNDPIQRLSNGILTPQETKINGIYKITKGRKIIEKEIIRIANNNTKDIGIEIVDVLIRKVTYDPSLIESVNNRMISERQQIAEEQRSIGLAEKTEILGSIEKEKLKILSEAKATAAKIKAEGDREAAKIYSNAYGKNIEFYKFWQALESYKAVLKDKRKIFSTDMDFFQYLHKRN

SEQ ID NO: 331 - DNA, 972 bp, Borrelia burgdorferi
atgaaatttataataaatcttttattatctactataaagattataacctttacagtaatagtttgcttgactattttgtctattttccagccaatttatattttgaaagaaaatgaaatttcaataaccactcgacttggaaaaattcaaagaactgaaaatttagctggacttaaatataaaataccattaattgaaaatgtgcaaatatttcccaaaatcattcttagatgggatggagaacctcaaagaatcccaacaggaggggaagaaaagcaattaatatggattgatacaactgctagatggaaaattgcagacataaataaattttacacaacaataaaaacaatgagtagagcttacgttagaattgatgcagcaattgaacctgctgttaggggggttattgcaaaataccctttgcttgaaattataagaagctcaaacgatcctattcaacgtttgtctaatggaatactcaccccacaagaaacaaaaattaacggtatttataaaataacaaaaggacgaaagataatcgaaaaagaaataattcgtatagcaaacaacaataccaaagatattggaattgaaattgtagacgtactaataagaaaagttacttatgacccaagccttattgaatctgtaaacaacagaatgatctcagaaagacaacaaatcgcagaagaacaaagaagcataggattagctgaaaaaacagaaattcttggaagcatagaaaaagaaaaactgaaaatattaagtgaagcaaaagccactgctgcaaaaataaaagccgaaggggatagagaagccgcaaaaatttattcaaatgcatatggcaaaaatattgaattttacaaattctggcaggcattagaaagctataaagcagtattaaaagataaaagaaaaattttctcaacagacatggatttctttcaatatcttcacaaaagaaattga

SEQ ID NO: 332 - DNA, 891 bp, Borrelia burgdorferi
attttccagccaatttatattttgaaagaaaatgaaatttcaataaccactcgacttggaaaaattcaaagaactgaaaatttagctggacttaaatataaaataccattaattgaaaatgtgcaaatatttcccaaaatcattcttagatgggatggagaacctcaaagaatcccaacaggaggggaagaaaagcaattaatatggattgatacaactgctagatggaaaattgcagacataaataaattttacacaacaataaaaacaatgagtagagcttacgttagaattgatgcagcaattgaacctgctgttaggggggttattgcaaaataccctttgcttgaaattataagaagctcaaacgatcctattcaacgtttgtctaatggaatactcaccccacaagaaacaaaaattaacggtatttataaaataacaaaaggacgaaagataatcgaaaaagaaataattcgtatagcaaacaacaataccaaagatattggaattgaaattgtagacgtactaataagaaaagttacttatgacccaagccttattgaatctgtaaacaacagaatgatctcagaaagacaacaaatcgcagaagaacaaagaagcataggattagctgaaaaaacagaaattcttggaagcatagaaaaagaaaaactgaaaatattaagtgaagcaaaagccactgctgcaaaaataaaagccgaaggggatagagaagccgcaaaaatttattcaaatgcatatggcaaaaatattgaattttacaaattctggcaggcattagaaagctataaagcagtattaaaagataaaagaaaaattttctcaacagacatggatttctttcaatatcttcacaaaagaaattga

SEQ ID NO: 333 - protein, 246 aa, Borrelia burgdorferi
MSGPKKLAIIALLVISIQGCKESSIIEKQFNYAIIFSDATEYFFEIQTTPFIKNEILFINDKNLEIIKDKLKTTKKILLTHKSNNEILNNEILKEKIFYLSKIKFSLKKSIDFLLNEKSIDLQKTLLFRDKSLNNEDLEYLEKKGKEKNVNITLINEKNISYIQTFITSQIKTIILFSLRDNNIILKKILNSPFSKNIKFVLIGNTRKDLKIIKLKYIITLKEPDLIKIAKDVEKDFQYEFNIYKQ

SEQ ID NO: 334 - protein, 220 aa, Borrelia burgdorferi
EKQFNYAIIFSDATEYFFEIQTTPFIKNEILFINDKNLEIIKDKLKTTKKILLTHKSNNEILNNEILKEKIFYLSKIKFSLKKSIDFLLNEKSIDLQKTLLFRDKSLNNEDLEYLEKKGKEKNVNITLINEKNISYIQTFITSQIKTIILFSLRDNNIILKKILNSPFSKNIKFVLIGNTRKDLKIIKLKYIITLKEPDLIKIAKDVEKDFQYEFNIYKQ

SEQ ID NO: 335 - DNA, 741 bp, Borrelia burgdorferi
atgtctggccctaaaaaacttgctataatagcgctcttagtaatttcaatacaaggatgcaaagaatcttctattattgaaaaacaatttaattatgcaataattttttcagatgcaactgaatatttttttgaaattcaaacaactccattcataaaaaacgaaatactatttataaatgacaaaaatttagaaattataaaagacaagcttaaaacaacaaaaaaaatactattaactcataaatcaaataatgaaattctaaataacgaaattctaaaagagaaaattttttatctatcaaaaataaaattttctctaaaaaaatctattgactttctgcttaacgaaaaatcaatagatttgcaaaaaacattactatttagagacaaatctctaaataacgaagaccttgaatacttggaaaaaaaaggcaaagaaaaaaatgtcaatattactctaataaacgaaaaaaacatatcctatattcaaacattcattacttctcaaataaaaacaataatattattctctttaagagataataatattattttaaaaaagatactaaattcgcctttttctaaaaatataaaatttgtattaattggcaatacaagaaaagacttaaaaattattaagctaaaatatataatcacccttaaagagcctgatttgataaaaatagcaaaagatgttgaaaaagattttcaatatgaatttaacatttataaacaataa

SEQ ID NO: 336 - DNA, 663 bp, Borrelia burgdorferi
gaaaaacaatttaattatgcaataattttttcagatgcaactgaatatttttttgaaattcaaacaactccattcataaaaaacgaaatactatttataaatgacaaaaatttagaaattataaaagacaagcttaaaacaacaaaaaaaatactattaactcataaatcaaataatgaaattctaaataacgaaattctaaaagagaaaattttttatctatcaaaaataaaattttctctaaaaaaatctattgactttctgcttaacgaaaaatcaatagatttgcaaaaaacattactatttagagacaaatctctaaataacgaagaccttgaatacttggaaaaaaaaggcaaagaaaaaaatgtcaatattactctaataaacgaaaaaaacatatcctatattcaaacattcattacttctcaaataaaaacaataatattattctctttaagagataataatattattttaaaaaagatactaaattcgcctttttctaaaaatataaaatttgtattaattggcaatacaagaaaagacttaaaaattattaagctaaaatatataatcacccttaaagagcctgatttgataaaaatagcaaaagatgttgaaaaagattttcaatatgaatttaacatttataaacaataa

SEQ ID NO: 337 - protein, 127 aa, Borrelia burgdorferi
MINFSKSFFYPLPIGKIFVLSGDMGSGKTSFLKGLALNLGISYFTSPTYNIVNVYDFINFKFYHIDLYRVSSLEEFELVGGLEILMDLDSIIAIEWPQIALSIVPKDRLFSLTFKIVGSGRVVELNG

SEQ ID NO: 338 - protein, 100 aa, Borrelia burgdorferi
KTSFLKGLALNLGISYFTSPTYNIVNVYDFINFKFYHIDLYRVSSLEEFELVGGLEILMDLDSIIAIEWPQIALSIVPKDRLFSLTFKIVGSGRVVELNG

SEQ ID NO: 339 - DNA, 384 bp, Borrelia burgdorferi
atgataaatttttccaaatcttttttttatcctttgccaattggtaaaatatttgttttaagtggtgacatgggatctggaaaaactagttttttaaagggacttgcccttaaccttggaatttcttattttacaagtccaacttataacattgttaatgtttatgattttataaattttaaattttatcatattgatttatatcgggtgtcttctttggaagaatttgagcttgttgggggattggaaatacttatggatcttgactcgattattgctattgaatggccacaaattgctttgagcattgttccaaaagatagattattttctttaacttttaaaatagtaggttcaggcagggttgtagaacttaatggttaa

SEQ ID NO: 340 - DNA, 303 bp, Borrelia burgdorferi
aaaactagttttttaaagggacttgcccttaaccttggaatttcttattttacaagtccaacttataacattgttaatgtttatgattttataaattttaaattttatcatattgatttatatcgggtgtcttctttggaagaatttgagcttgttgggggattggaaatacttatggatcttgactcgattattgctattgaatggccacaaattgctttgagcattgttccaaaagatagattattttctttaacttttaaaatagtaggttcaggcagggttgtagaacttaatggttaa

SEQ ID NO: 341 - protein, 389 aa, Borrelia burgdorferi
MNTKATTPLLLLFLIQSLAFSSEIFEFKYIKGSKFRLEGTDNQKIYFNGHYNSSSNTNIQISSEIKDIKENFASIKAFFRILKRENINEPYLLNEEFEEIFSVNKQGEYTIGANQKRPSVRGIPRFPKTPIKINEKWSYLAEEYIEASKIDKSIKDFVVKFNVNYEYKGKEEHNGKHYHIILSNYESQYNVKNISFYQKVDQKIYFDNEIGNTYKYSDKYIFEINQNNNQHFKMIGNSLGRIVSIELPNDNLIETEVENYIREKKIKAIEVEKNNKGINLSFDIEFYPNSFQILQKEYKKIDLIAKLLEKFKKNNILIEGHTEQFGLEEEMHELSEKRARAIGNYLIKMKVKDKDQILFKGWGSQKPKYPKSSPLKAKNRRVEITILNN

SEQ ID NO: 342 - protein, 368 aa, Borrelia burgdorferi
SEIFEFKYIKGSKFRLEGTDNQKIYFNGHYNSSSNTNIQISSEIKDIKENFASIKAFFRILKRENINEPYLLNEEFEEIFSVNKQGEYTIGANQKRPSVRGIPRFPKTPIKINEKWSYLAEEYIEASKIDKSIKDFVVKFNVNYEYKGKEEHNGKHYHIILSNYESQYNVKNISFYQKVDQKIYFDNEIGNTYKYSDKYIFEINQNNNQHFKMIGNSLGRIVSIELPNDNLIETEVENYIREKKIKAIEVEKNNKGINLSFDIEFYPNSFQILQKEYKKIDLIAKLLEKFKKNNILIEGHTEQFGLEEEMHELSEKRARAIGNYLIKMKVKDKDQILFKGWGSQKPKYPKSSPLKAKNRRVEITILNN

SEQ ID NO: 343 - DNA, 1170 bp, Borrelia burgdorferi
atgaataccaaggcgactacaccattgttgttattatttttaattcaaagcttagctttttcttctgaaatctttgaatttaaatacattaaaggttcaaagtttagattagaaggcacagataatcaaaaaatatatttcaatggccattataattcaagctctaataccaatattcaaatttcaagtgaaataaaagacataaaagaaaactttgcaagcattaaagctttttttagaatcttaaaaagagaaaatattaatgaaccttacctattaaatgaagagtttgaagaaatcttcagcgtaaataagcaaggagaatatacaataggagcaaatcaaaaaagaccttctgttagaggtattccaagattcccaaaaacaccaatcaaaataaatgaaaaatggtcatatcttgcagaagaatatatagaagcgtcaaaaatagacaaaagtataaaagatttcgttgtaaaatttaatgttaactacgaatataaaggcaaagaagagcacaatggcaagcattaccacataattctttcgaattatgaatcacaatacaatgtaaaaaacatctctttctatcaaaaagtagaccaaaaaatttattttgataatgaaattggcaatacatataaatacagcgataaatatatatttgaaataaatcagaacaacaaccaacattttaaaatgattggaaactctcttggcagaatagtttcaattgagcttccaaatgataatcttattgaaactgaggttgaaaattacatccgagaaaaaaaaataaaagctattgaagttgaaaaaaacaataaaggtattaatttaagctttgacattgaattttatcctaactcatttcaaatactacaaaaagaatataaaaaaattgaccttatagctaaacttcttgaaaaatttaaaaaaaataacatactaatagaaggacatactgagcaatttggattggaagaagagatgcacgagctatctgaaaaaagagctcgtgcaattggaaattatttaataaaaatgaaagtaaaagacaaagaccaaatactatttaaaggatggggatctcaaaaaccaaaatatcctaagtcctccccattaaaggctaaaaataggcgagtagaaattacaatattaaataactaa

SEQ ID NO: 344 - DNA, 1107 bp, Borrelia burgdorferi
tctgaaatctttgaatttaaatacattaaaggttcaaagtttagattagaaggcacagataatcaaaaaatatatttcaatggccattataattcaagctctaataccaatattcaaatttcaagtgaaataaaagacataaaagaaaactttgcaagcattaaagctttttttagaatcttaaaaagagaaaatattaatgaaccttacctattaaatgaagagtttgaagaaatcttcagcgtaaataagcaaggagaatatacaataggagcaaatcaaaaaagaccttctgttagaggtattccaagattcccaaaaacaccaatcaaaataaatgaaaaatggtcatatcttgcagaagaatatatagaagcgtcaaaaatagacaaaagtataaaagatttcgttgtaaaatttaatgttaactacgaatataaaggcaaagaagagcacaatggcaagcattaccacataattctttcgaattatgaatcacaatacaatgtaaaaaacatctctttctatcaaaaagtagaccaaaaaatttattttgataatgaaattggcaatacatataaatacagcgataaatatatatttgaaataaatcagaacaacaaccaacattttaaaatgattggaaactctcttggcagaatagtttcaattgagcttccaaatgataatcttattgaaactgaggttgaaaattacatccgagaaaaaaaaataaaagctattgaagttgaaaaaaacaataaaggtattaatttaagctttgacattgaattttatcctaactcatttcaaatactacaaaaagaatataaaaaaattgaccttatagctaaacttcttgaaaaatttaaaaaaaataacatactaatagaaggacatactgagcaatttggattggaagaagagatgcacgagctatctgaaaaaagagctcgtgcaattggaaattatttaataaaaatgaaagtaaaagacaaagaccaaatactatttaaaggatggggatctcaaaaaccaaaatatcctaagtcctccccattaaaggctaaaaataggcgagtagaaattacaatattaaataactaa

SEQ ID NO: 345 - protein, 612 aa, Borrelia burgdorferi
MKIFIYWVVIFFFSVFKVFSIYSLTDEEFFKKYSLFFVHKGFLSKNVNGKITKVQVNGINSRWVYPFYKLVPSRITSIYEDVYSSSSFLTTSNNLYVSYDYSKNFRKLVGIDKFNSGAYITSSAFSQGDYKRIAIGTAIHGIYLSVNGAISFKNLNRLIPQIYLGAGYYDIISAIEFSKEETNNLYFSSGVYGDIFLISQKSGFIKKISFPFKKQIIRILDLSSKNVEKILVRTYDNHFYSYINGQWVFIGKLSLQDQDFFEKSQRMQLAKNKGSIYLTAYTLRNKKAVDERFKFIKDSGMNAVVIDFKDDNGNLTYSSKLSLPNKLRSVKNFIDVPYILKKAKELGIYVIARCVVFKDSKLYYYDNFKHALWNKKTNKPWAHLIKKVDSSGLVKYVQVEHWVDIFSPATWEYNISIAKEIQSFGVDEIQFDYIRFPSDGPVSLAISRMNKYEMQPVDALESFLIMAREQLYVPISVDIYGYNGWFPTNSIGQNISMLSDYVDVISPMFYPSHYTDDFLPSNFYYTKRAYRIYKEGSDRALAFSLDGVVIRPYVQAFLLGKERLVDDEIYLEYLKFQLKGIKESFGSGFSLWNASNVYYMIKGSLKEYLDSF

SEQ ID NO: 346 - protein, 592 aa, Borrelia burgdorferi
IYSLTDEEFFKKYSLFFVHKGFLSKNVNGKITKVQVNGINSRWVYPFYKLVPSRITSIYEDVYSSSSFLTTSNNLYVSYDYSKNFRKLVGIDKFNSGAYITSSAFSQGDYKRIAIGTAIHGIYLSVNGAISFKNLNRLIPQIYLGAGYYDIISAIEFSKEETNNLYFSSGVYGDIFLISQKSGFIKKISFPFKKQIIRILDLSSKNVEKILVRTYDNHFYSYINGQWVFIGKLSLQDQDFFEKSQRMQLAKNKGSIYLTAYTLRNKKAVDERFKFIKDSGMNAVVIDFKDDNGNLTYSSKLSLPNKLRSVKNFIDVPYILKKAKELGIYVIARCVVFKDSKLYYYDNFKHALWNKKTNKPWAHLIKKVDSSGLVKYVQVEHWVDIFSPATWEYNISIAKEIQSFGVDEIQFDYIRFPSDGPVSLAISRMNKYEMQPVDALESFLIMAREQLYVPISVDIYGYNGWFPTNSIGQNISMLSDYVDVISPMFYPSHYTDDFLPSNFYYTKRAYRIYKEGSDRALAFSLDGVVIRPYVQAFLLGKERLVDDEIYLEYLKFQLKGIKESFGSGFSLWNASNVYYMIKGSLKEYLDSF

SEQ ID NO: 347 - DNA, 1839 bp, Borrelia burgdorferi
atgaaaatttttatctattgggtagttattttcttcttttctgttttcaaggtttttagtatatattcattaaccgatgaagaattttttaaaaaatatagtttattttttgttcataaaggatttttaagtaaaaatgttaatgggaaaataaccaaagttcaagtcaatgggataaattctaggtgggtttaccctttttataagcttgttcctagtcgaattacttctatttatgaggatgtttattcttcaagttcatttttgactacaagtaacaatctttatgtttcttatgattattcaaaaaattttagaaaattagtaggaattgataaatttaatagcggtgcatatattacatctagtgccttttctcaaggagattacaagcgtattgctattggaactgcgattcatggtatttatcttagtgttaatggagctattagttttaaaaatttaaatcgtttgattccgcagatttatttaggtgcaggatattacgatattattagtgctattgaattttcaaaagaagagacaaataatttatatttttcctctggagtttatggagatatttttttaattagtcagaaaagtggatttattaaaaaaatatcttttcctttcaaaaagcaaataatacgtattttagacttatctagtaagaatgtagaaaaaattttagtcagaacatatgacaatcatttttattcttatattaatgggcaatgggtatttattggaaaattatctttgcaggatcaggatttttttgaaaaatcacaaaggatgcagcttgctaaaaataaagggtctatttatttaacagcatatacattgcgtaataagaaggcagttgatgaaagatttaaatttattaaagattcaggtatgaatgctgttgtaattgattttaaagatgataatggtaatttgacttattctagcaagctttctttgcccaataagttgagatctgttaaaaactttattgatgttccttatattcttaaaaaagcaaaagagcttggaatttatgttattgctagatgtgttgtatttaaagattcaaaattgtattattatgataattttaaacacgccctttggaataaaaaaaccaataaaccttgggctcatttgattaaaaaagttgattctagtggtcttgtgaaatatgtacaagtagagcattgggtagatattttttctcctgctacttgggaatataatatttctatcgcaaaagaaattcaatcttttggagttgacgagatacaatttgattatattagatttccatcagatgggcctgtgtctcttgcaatctcaagaatgaataagtatgagatgcaacccgttgatgcacttgaatcttttttgattatggcaagagaacagctttatgttcctatttctgttgatatttatgggtacaatggctggtttcctactaatagtattgggcaaaatatttcaatgttatcagattatgttgacgtcatatctcctatgttttatccttcgcattatactgatgattttttgccaagcaatttttattacacaaaaagagcttataggatttataaagaggggagtgatagagcacttgctttttctttagatggggttgttattaggccttatgttcaagcttttttattaggaaaagaaagattggtggatgacgagatttatttggagtatttaaagtttcagcttaaaggaattaaagagtcatttggtagtggctttagcctttggaatgcatctaatgtttattatatgattaaaggtagtttaaaagaatatttagattctttttaa

SEQ ID NO: 348 - DNA, 1779 bp, Borrelia burgdorferi
atatattcattaaccgatgaagaattttttaaaaaatatagtttattttttgttcataaaggatttttaagtaaaaatgttaatgggaaaataaccaaagttcaagtcaatgggataaattctaggtgggtttaccctttttataagcttgttcctagtcgaattacttctatttatgaggatgtttattcttcaagttcatttttgactacaagtaacaatctttatgtttcttatgattattcaaaaaattttagaaaattagtaggaattgataaatttaatagcggtgcatatattacatctagtgccttttctcaaggagattacaagcgtattgctattggaactgcgattcatggtatttatcttagtgttaatggagctattagttttaaaaatttaaatcgtttgattccgcagatttatttaggtgcaggatattacgatattattagtgctattgaattttcaaaagaagagacaaataatttatatttttcctctggagtttatggagatatttttttaattagtcagaaaagtggatttattaaaaaaatatcttttcctttcaaaaagcaaataatacgtattttagacttatctagtaagaatgtagaaaaaattttagtcagaacatatgacaatcatttttattcttatattaatgggcaatgggtatttattggaaaattatctttgcaggatcaggatttttttgaaaaatcacaaaggatgcagcttgctaaaaataaagggtctatttatttaacagcatatacattgcgtaataagaaggcagttgatgaaagatttaaatttattaaagattcaggtatgaatgctgttgtaattgattttaaagatgataatggtaatttgacttattctagcaagctttctttgcccaataagttgagatctgttaaaaactttattgatgttccttatattcttaaaaaagcaaaagagcttggaatttatgttattgctagatgtgttgtatttaaagattcaaaattgtattattatgataattttaaacacgccctttggaataaaaaaaccaataaaccttgggctcatttgattaaaaaagttgattctagtggtcttgtgaaatatgtacaagtagagcattgggtagatattttttctcctgctacttgggaatataatatttctatcgcaaaagaaattcaatcttttggagttgacgagatacaatttgattatattagatttccatcagatgggcctgtgtctcttgcaatctcaagaatgaataagtatgagatgcaacccgttgatgcacttgaatcttttttgattatggcaagagaacagctttatgttcctatttctgttgatatttatgggtacaatggctggtttcctactaatagtattgggcaaaatatttcaatgttatcagattatgttgacgtcatatctcctatgttttatccttcgcattatactgatgattttttgccaagcaatttttattacacaaaaagagcttataggatttataaagaggggagtgatagagcacttgctttttctttagatggggttgttattaggccttatgttcaagcttttttattaggaaaagaaagattggtggatgacgagatttatttggagtatttaaagtttcagcttaaaggaattaaagagtcatttggtagtggctttagcctttggaatgcatctaatgtttattatatgattaaaggtagtttaaaagaatatttagattctttttaa

SEQ ID NO: 349 - protein, 224 aa, Borrelia burgdorferi
MSIKKFILTLIILSLAKNSFSENEINIFENENYIVKENIKTEIKKLKQSFLLASVDVAISQPYIELADLNGEPIKELEGISYSFINVFSKIGSSAIISFDLSNEASKKYKIIKLEFLSPDKGNFINQLSSLTSGKQQSKKELAKDAYSFGTLRTESLSKTIAEYYKDNNWYYILAAITVENNINKETEKYEIRINPKIYNDFQKKLRLHFKSNQIKKFPIPIIE

SEQ ID NO: 350 - protein, 208 aa, Borrelia burgdorferi
KNSFSENEINIFENENYIVKENIKTEIKKLKQSFLLASVDVAISQPYIELADLNGEPIKELEGISYSFINVFSKIGSSAIISFDLSNEASKKYKIIKLEFLSPDKGNFINQLSSLTSGKQQSKKELAKDAYSFGTLRTESLSKTIAEYYKDNNWYYILAAITVENNINKETEKYEIRINPKIYNDFQKKLRLHFKSNQIKKFPIPIIE

SEQ ID NO: 351 - DNA, 675 bp, Borrelia burgdorferi
atgagcattaaaaaatttattttaaccttgataattctttctctagctaaaaatagcttttctgaaaacgaaattaatatcttcgaaaacgaaaattatattgtaaaagaaaatataaaaacagaaattaaaaaactaaaacaaagttttttacttgcatctgttgatgtcgccattagccaaccctacatagaattggcagatttaaatggagaaccgataaaagaacttgaagggattagttattcatttataaatgtattttcaaaaattggatcttctgctattatttcatttgacctatcaaacgaagcttccaagaaatacaaaatcataaaattagaatttttaagtccagataaaggcaattttattaaccagctaagcagccttactagtggaaaacagcaatcaaaaaaagagcttgcaaaagacgcttactcatttggtacattaagaactgaatctctttcaaaaacaattgcagaatattacaaagataacaactggtattatattttagcagcaataacagtagaaaataatataaataaagaaactgaaaaatacgaaattagaattaaccctaaaatatataatgattttcaaaaaaaattgagattacattttaaaagcaaccaaataaaaaaatttccaatacccattatagaataa

SEQ ID NO: 352 - DNA, 627 bp, Borrelia burgdorferi
aaaaatagcttttctgaaaacgaaattaatatcttcgaaaacgaaaattatattgtaaaagaaaatataaaaacagaaattaaaaaactaaaacaaagttttttacttgcatctgttgatgtcgccattagccaaccctacatagaattggcagatttaaatggagaaccgataaaagaacttgaagggattagttattcatttataaatgtattttcaaaaattggatcttctgctattatttcatttgacctatcaaacgaagcttccaagaaatacaaaatcataaaattagaatttttaagtccagataaaggcaattttattaaccagctaagcagccttactagtggaaaacagcaatcaaaaaaagagcttgcaaaagacgcttactcatttggtacattaagaactgaatctctttcaaaaacaattgcagaatattacaaagataacaactggtattatattttagcagcaataacagtagaaaataatataaataaagaaactgaaaaatacgaaattagaattaaccctaaaatatataatgattttcaaaaaaaattgagattacattttaaaagcaaccaaataaaaaaatttccaatacccattatagaataa

SEQ ID NO: 353 - protein, 127 aa, Borrelia burgdorferi
MKKHIIIGIIFVAILLFFKILLIPRIQNHENNKNNIKMIISYKQDKNRLSLKINIKTKKTTNLGKAKLDIYLDSKLIESNLLYISSKNFTTYANIIYQNESLLSIILKSNGNNNVFYSKRIKPRGKI

SEQ ID NO: 354 - protein, 99 aa, Borrelia burgdorferi
HENNKNNIKMIISYKQDKNRLSLKINIKTKKTTNLGKAKLDIYLDSKLIESNLLYISSKNFTTYANIIYQNESLLSIILKSNGNNNVFYSKRIKPRGKI

SEQ ID NO: 355 - DNA, 384 bp, Borrelia burgdorferi
atgaaaaaacatatcattattgggataatctttgttgcaattcttttattttttaaaattttattaattcccagaattcaaaatcacgaaaataataaaaataatatcaaaatgataataagctacaagcaagacaaaaacagattatcgctaaagataaacataaaaacaaaaaaaactaccaacctgggaaaagccaaactagatatttatctagacagtaaattaattgaaagcaatttgctttatataagcagcaaaaactttacaacatatgctaatataatctatcaaaatgaaagtttattaagtataatattaaagagtaatggcaataataatgtcttttatagtaaaagaataaaacctagaggtaaaatatga

SEQ ID NO: 356 - DNA, 300 bp, Borrelia burgdorferi
cacgaaaataataaaaataatatcaaaatgataataagctacaagcaagacaaaaacagattatcgctaaagataaacataaaaacaaaaaaaactaccaacctgggaaaagccaaactagatatttatctagacagtaaattaattgaaagcaatttgctttatataagcagcaaaaactttacaacatatgctaatataatctatcaaaatgaaagtttattaagtataatattaaagagtaatggcaataataatgtcttttatagtaaaagaataaaacctagaggtaaaatatga

SEQ ID NO: 357 - protein, 378 aa, Borrelia burgdorferi
MKKHYKALILSLLFAIISCNTKTLNELGEEQFKIPFGTLPGAIMPLNNKFTNSKFDIKTYNGLVYIAEIKTNKLMIFNSYGKLIQTYQNGIFKTNPDLKIKKIDFEGIQAIYPLKDFIIVADKLNNKKSKFNQKENIAYFMRILILNKNSSVEILGQEGLNGMPFPQIYDVNVDENGNIAIISIYSEGYIIYSYNKEFSPLYKIYVNKNLLKTIDNQKKKYNISIDKVFFEVNKKTLYVKTTYYENIGDNENINDLGIKIKDQYIYKMSLKKNKELEVINKIALPKNLLDDKQESFINIIKIQKDKIIASTNMKNLSNNLIWKLDSKGSIKEQIALIEPPNLMFLSESLSKDGILSILYGGKTGVSVYWWNLNALLKL

SEQ ID NO: 358 - protein, 357 aa, Borrelia burgdorferi
KTLNELGEEQFKIPFGTLPGAIMPLNNKFTNSKFDIKTYNGLVYIAEIKTNKLMIFNSYGKLIQTYQNGIFKTNPDLKIKKIDFEGIQAIYPLKDFIIVADKLNNKKSKFNQKENIAYFMRILILNKNSSVEILGQEGLNGMPFPQIYDVNVDENGNIAIISIYSEGYIIYSYNKEFSPLYKIYVNKNLLKTIDNQKKKYNISIDKVFFEVNKKTLYVKTTYYENIGDNENINDLGIKIKDQYIYKMSLKKNKELEVINKIALPKNLLDDKQESFINIIKIQKDKIIASTNMKNLSNNLIWKLDSKGSIKEQIALIEPPNLMFLSESLSKDGILSILYGGKTGVSVYWWNLNALLKL

SEQ ID NO: 359 - DNA, 1137 bp, Borrelia burgdorferi
atgaaaaaacactataaagctcttatattaagcttgctttttgcaattatatcatgtaatactaaaactttaaacgaattaggagaagaacaatttaaaataccatttggaacacttcctggtgcaataatgcctctgaataacaaatttacaaattcaaaatttgacatcaaaacgtataacgggctagtgtacattgcagaaataaaaacaaataaattaatgattttcaactcatacggaaaactaatacaaacatatcaaaatggaatatttaaaacaaaccccgatttaaaaataaaaaaaatagattttgaaggaattcaagcaatatacccactaaaagattttattattgtcgcagacaaactaaataataaaaaatcaaaattcaaccaaaaagagaatattgcctacttcatgagaatactaatactaaacaaaaactcatctgtagaaattttgggtcaagaaggtttaaacggaatgccatttccacaaatttatgatgttaatgttgatgaaaatggcaacattgcaataatatcaatatatagcgaaggatatataatatattcttacaataaagaattttccccgctttataaaatttacgtcaacaaaaacctgttaaaaacaatagacaatcaaaagaaaaaatacaacatttcaatagataaggttttttttgaagtcaacaaaaaaactctttatgtaaaaactacttactatgaaaacattggtgacaatgaaaatataaacgatcttggaattaaaattaaagatcaatatatctataaaatgagtttgaaaaaaaacaaagaattagaagtgataaataaaattgctcttcctaaaaacttactagatgataaacaagaaagctttataaacattataaaaatacaaaaagacaaaataatagcatctactaatatgaaaaatttatctaacaatttaatatggaaattagacagcaagggctcaattaaagaacaaatagctttaattgagcctccaaatttaatgtttctctctgagagtttatctaaagatggaatacttagtatactttatggcggaaaaactggtgttagtgtttactggtggaatttaaatgcattattaaaattataa

SEQ ID NO: 360 - DNA, 1074 bp, Borrelia burgdorferi
aaaactttaaacgaattaggagaagaacaatttaaaataccatttggaacacttcctggtgcaataatgcctctgaataacaaatttacaaattcaaaatttgacatcaaaacgtataacgggctagtgtacattgcagaaataaaaacaaataaattaatgattttcaactcatacggaaaactaatacaaacatatcaaaatggaatatttaaaacaaaccccgatttaaaaataaaaaaaatagattttgaaggaattcaagcaatatacccactaaaagattttattattgtcgcagacaaactaaataataaaaaatcaaaattcaaccaaaaagagaatattgcctacttcatgagaatactaatactaaacaaaaactcatctgtagaaattttgggtcaagaaggtttaaacggaatgccatttccacaaatttatgatgttaatgttgatgaaaatggcaacattgcaataatatcaatatatagcgaaggatatataatatattcttacaataaagaattttccccgctttataaaatttacgtcaacaaaaacctgttaaaaacaatagacaatcaaaagaaaaaatacaacatttcaatagataaggttttttttgaagtcaacaaaaaaactctttatgtaaaaactacttactatgaaaacattggtgacaatgaaaatataaacgatcttggaattaaaattaaagatcaatatatctataaaatgagtttgaaaaaaaacaaagaattagaagtgataaataaaattgctcttcctaaaaacttactagatgataaacaagaaagctttataaacattataaaaatacaaaaagacaaaataatagcatctactaatatgaaaaatttatctaacaatttaatatggaaattagacagcaagggctcaattaaagaacaaatagctttaattgagcctccaaatttaatgtttctctctgagagtttatctaaagatggaatacttagtatactttatggcggaaaaactggtgttagtgtttactggtggaatttaaatgcattattaaaattataa

SEQ ID NO: 361 - protein, 290 aa, Borrelia burgdorferi
MYKLFLFFIIFMFLSCDEKKSSKNLKSVKIGYVNWGGETAATNVLKVVFEKMGYNAEIFSVTTSIMYQYLASGKIDGTVSSWVPTADKFYYEKLKTKFVDLGANYEGTIQGFVVPSYVPISSISELKGKGDKFKNKMIGIDAGAGTQIVTEQALNYYGLSKEYELVPSSESVMLASLDSSIKRNEWILVPLWKPHWAFSRYDIKFLDDPDLIMGGIESVHTLVRLGLENDDFDAYYVFDHFYWSDDLILPLMDKNDKEPGKEYRNAVEFVEKNKEIVKTWVPEKYKTLFD

SEQ ID NO: 362 - protein, 275 aa, Borrelia burgdorferi
CDEKKSSKNLKSVKIGYVNWGGETAATNVLKVVFEKMGYNAEIFSVTTSIMYQYLASGKIDGTVSSWVPTADKFYYEKLKTKFVDLGANYEGTIQGFVVPSYVPISSISELKGKGDKFKNKMIGIDAGAGTQIVTEQALNYYGLSKEYELVPSSESVMLASLDSSIKRNEWILVPLWKPHWAFSRYDIKFLDDPDLIMGGIESVHTLVRLGLENDDFDAYYVFDHFYWSDDLILPLMDKNDKEPGKEYRNAVEFVEKNKEIVKTWVPEKYKTLFD

SEQ ID NO: 363 - DNA, 873 bp, Borrelia burgdorferi
atgtataaattatttttattttttattatttttatgtttttgtcttgtgatgaaaaaaagagttcaaagaatttaaaatcggtaaaaattggatatgtgaattggggtggagaaacggcagctacaaatgtattaaaggttgtttttgagaaaatgggctacaatgcagaaatattttcagttactacgtctataatgtatcaatacttagcatctggaaagatagacggtacggtgtcttcttgggttcctacagccgataaattttattatgaaaaactgaaaacaaagtttgttgatcttggtgcaaattatgaaggaaccattcaaggttttgtggtgccaagctatgttccaatttccagcattagtgagcttaagggtaaaggtgataagtttaaaaacaaaatgattggcatagatgctggtgcgggaactcaaattgttacagaacaagcgcttaattattatggattaagtaaagagtatgagctagttccttcaagtgagagtgttatgcttgcaagtttagattcttcaataaagagaaacgaatggattttagttcctttgtggaagcctcattgggctttttctaggtatgatattaagtttcttgatgatcctgatttaattatggggggaattgagagcgtgcatactcttgttagacttggtcttgaaaatgatgattttgatgcatattatgtttttgatcatttttattggagcgatgatttaatattgcccttaatggataaaaatgataaagagccaggcaaagaataccgcaatgcggttgaatttgttgaaaagaataaagagattgtaaagacgtgggttccagaaaaatataagaccttatttgattaa

SEQ ID NO: 364 - DNA, 828 bp, Borrelia burgdorferi
tgtgatgaaaaaaagagttcaaagaatttaaaatcggtaaaaattggatatgtgaattggggtggagaaacggcagctacaaatgtattaaaggttgtttttgagaaaatgggctacaatgcagaaatattttcagttactacgtctataatgtatcaatacttagcatctggaaagatagacggtacggtgtcttcttgggttcctacagccgataaattttattatgaaaaactgaaaacaaagtttgttgatcttggtgcaaattatgaaggaaccattcaaggttttgtggtgccaagctatgttccaatttccagcattagtgagcttaagggtaaaggtgataagtttaaaaacaaaatgattggcatagatgctggtgcgggaactcaaattgttacagaacaagcgcttaattattatggattaagtaaagagtatgagctagttccttcaagtgagagtgttatgcttgcaagtttagattcttcaataaagagaaacgaatggattttagttcctttgtggaagcctcattgggctttttctaggtatgatattaagtttcttgatgatcctgatttaattatggggggaattgagagcgtgcatactcttgttagacttggtcttgaaaatgatgattttgatgcatattatgtttttgatcatttttattggagcgatgatttaatattgcccttaatggataaaaatgataaagagccaggcaaagaataccgcaatgcggttgaatttgttgaaaagaataaagagattgtaaagacgtgggttccagaaaaatataagaccttatttgattaa

SEQ ID NO: 365 - protein, 1036 aa, Borrelia burgdorferi
MLVKRIVGKPITMLILFSLLLMISLYTFSRLKVDLLPGIDIPQISIHTVYPGASPREVEESVSRVLESGLSSVKNLKNIYSVSSKESSTVSLEFYHGTDLDLVLNEIRDALELVKSSLPSKSQTPRIFRYNLKNIPVMEIVINSVRPVSELKRYADEIIKPGLERLDGVAIVTVNGGSKKRVLIEVSQNRLESYGLSLSRISSIIASQNLELSAGNILENNLEYLVEVSGKFKSIEEIGNVVIAYKIPDISSGINLSPIEIKLKDIANIKTDFEDLSEYVEYNGLPSISLSVQKRSDSNSIAVSNVVMNEIEKLKLSMPKDMKLEIASDSTDFIKASISTVVNSAYFGAMLAIFVIFFFLRSFRATIIIGISIPIAIVLTFCLMYFVNISLNIMSLAGLALGIGMVVDCSIVVIDNIYKYRQKGAKLISSSILGAQEMMLPITSSTFTSICVFGPFLIFKSELGVYGDFFKDFTFTIVISLGVSLLVAIFLVPVLSSHYVGLYTSFQKNIKNAFIRKIDAFFASIYYFLEFLYINLLNIVLNHKLIFGLIVFFSFIGSLLLGLLLDVTTFTRGKENSITINLNFPHKTNLEYAKFYSNRFLEIVKSEAKGYKSIIATLRADRITFNVLFPLKEESRDNLTQSVDYDSIKYKIMNRIGNLYPEFNIEPSISGNALGGGDSIKIKISANDFEYIKDYGKILVSMLKKEIPELVNPRLSISDFQLQIGVEIDRALVYNYGIDMNTILNELKANINGVVAGQYVEKGLNYDIVLKLDRMDVKNLKDLEKIFITNSSGVKIPFSSIATFEKTNKAESIYRENQALTIYLNAGISPDDNLTQVTAKVVDFINNKVPHKEGITLKVEGEYNEFSNIMNQFKIIIMMAIIVVFGIMASQFESFLKPFIIIFTIPLTAIGVVLIHFLAGEKLSIFAAIGMLMLVGVVVNTGIVLVDYTGLLIKRGFGLREAIIESCRSRLRPILMSSLTSIIGLIPMAFSSGSGNELLKPIAFTFIGGMTASTFLTLFFIPMLFEIFPTCFKFQI

SEQ ID NO: 366 - protein, 1007 aa, Borrelia burgdorferi
RLKVDLLPGIDIPQISIHTVYPGASPREVEESVSRVLESGLSSVKNLKNIYSVSSKESSTVSLEFYHGTDLDLVLNEIRDALELVKSSLPSKSQTPRIFRYNLKNIPVMEIVINSVRPVSELKRYADEIIKPGLERLDGVAIVTVNGGSKKRVLIEVSQNRLESYGLSLSRISSIIASQNLELSAGNILENNLEYLVEVSGKFKSIEEIGNVVIAYKIPDISSGINLSPIEIKLKDIANIKTDFEDLSEYVEYNGLPSISLSVQKRSDSNSIAVSNVVMNEIEKLKLSMPKDMKLEIASDSTDFIKASISTVVNSAYFGAMLAIFVIFFFLRSFRATIIIGISIPIAIVLTFCLMYFVNISLNIMSLAGLALGIGMVVDCSIVVIDNIYKYRQKGAKLISSSILGAQEMMLPITSSTFTSICVFGPFLIFKSELGVYGDFFKDFTFTIVISLGVSLLVAIFLVPVLSSHYVGLYTSFQKNIKNAFIRKIDAFFASIYYFLEFLYINLLNIVLNHKLIFGLIVFFSFIGSLLLGLLLDVTTFTRGKENSITINLNFPHKTNLEYAKFYSNRFLEIVKSEAKGYKSIIATLRADRITFNVLFPLKEESRDNLTQSVDYDSIKYKIMNRIGNLYPEFNIEPSISGNALGGGDSIKIKISANDFEYIKDYGKILVSMLKKEIPELVNPRLSISDFQLQIGVEIDRALVYNYGIDMNTILNELKANINGVVAGQYVEKGLNYDIVLKLDRMDVKNLKDLEKIFITNSSGVKIPFSSIATFEKTNKAESIYRENQALTIYLNAGISPDDNLTQVTAKVVDFINNKVPHKEGITLKVEGEYNEFSNIMNQFKIIIMMAIIVVFGIMASQFESFLKPFIIIFTIPLTAIGVVLIHFLAGEKLSIFAAIGMLMLVGVVVNTGIVLVDYTGLLIKRGFGLREAIIESCRSRLRPILMSSLTSIIGLIPMAFSSGSGNELLKPIAFTFIGGMTASTFLTLFFIPMLFEIFPTCFKFQI

SEQ ID NO: 367 - DNA, 3111 bp, Borrelia burgdorferi
atgttggtaaagagaatagttggcaaaccaataacaatgttgattttattttcattgttattgatgataagtttgtataccttttcaagattaaaagtagatcttttgccgggaattgacattccccaaataagtattcacactgtttatcctggcgcttctcctagagaagttgaagagagtgtttctagagtccttgagagtggcttgagttcggtaaagaatttaaaaaatatatatagtgtatcttccaaagaaagcagcaccgtttcacttgaattttatcatggaaccgatttagatttggttttaaatgaaattcgagatgctcttgaattggtaaaatcttcattgcccagcaaatcacagaccccaagaatttttagatacaatcttaaaaacatccctgtaatggaaattgttattaattctgtaaggccagtttctgagcttaaaagatatgccgatgaaatcattaaacctgggcttgaaaggcttgatggagttgcaattgttactgttaatggtggaagtaaaaagcgtgttttaattgaagtttctcaaaacaggctggagtcttatgggctttctttgtcaagaatatcttcaattatagcatcccaaaatttggaactttcagctggcaatatattggagaacaacttggaatatttggttgaagtttctggaaaatttaaatcaattgaagagataggtaatgtggtcatagcttataagatacccgacatttcttctggcataaatttatctcctattgagataaaactcaaagatattgctaatattaaaaccgattttgaagatttgtctgaatatgttgaatataatgggttgccttcaatttctttgtcggttcaaaaacgtagtgattctaattctattgcagtttctaatgttgttatgaatgaaatagaaaaattgaaattatctatgcctaaagatatgaaattggagattgcttctgatagtactgattttattaaagcatccatttcaacggttgtaaattcagcctattttggggccatgcttgcaatatttgttatttttttctttttaagaagctttagggccacaataattattggaatttctattccaatagcaattgttttgaccttttgtttaatgtattttgtaaatatttctcttaatattatgagtcttgcgggtcttgcacttgggattggaatggttgttgactgttcaattgttgtaatagacaatatatacaaatataggcaaaaaggagcaaagcttatttcgtcttctattctcggagctcaggagatgatgttgcctattacatcttcaacttttacttctatttgtgtttttggtccatttcttattttcaaatcagaacttggggtatatggagattttttcaaagactttacatttacgattgttatttccttgggtgtttctcttttagttgcaatttttttggttcctgttttatcaagccactatgtcggtttatacacaagtttccaaaagaatattaagaatgcttttattaggaaaatcgatgccttttttgctagtatttattattttttagagtttttgtatatcaatttattaaatatagttttaaatcacaaattgatttttgggttgattgttttttttagttttattggcagcttgcttttaggattattgttagatgtgacaacttttactagagggaaagagaactcaattactattaatttaaattttccccacaaaactaatttggaatatgcaaaattttattctaatagatttttagaaattgtaaaaagtgaggctaaaggatataaaagtattattgctactttgcgtgctgatagaataactttcaacgtattgtttcctctcaaagaagaatcaagagataatttaacccaaagcgtagattacgattctattaaatataaaattatgaatcgtattggtaatctttatcctgaatttaatattgagccttccattagtggcaatgctttaggtggtggagattctattaaaattaaaatttcggccaatgattttgaatatataaaagattatggaaaaattttagtttccatgttaaaaaaggaaattcccgaacttgtaaatccaaggcttagcataagtgattttcagcttcaaattggcgttgagatagacagagcgctagtttataattatggtattgacatgaataccattttaaatgagttgaaggccaatattaatggtgttgttgctgggcaatatgtggagaagggacttaattatgatattgttcttaagcttgatagaatggatgttaaaaatttaaaagatttagaaaaaatatttattacaaattcatctggagttaaaattcctttttcatcaatagccacctttgaaaaaaccaataaagccgaatctatttacagagaaaatcaagctttaaccatttatcttaatgcgggtatttctccagatgataatttaacccaagtaaccgcaaaagttgtagattttattaataataaggtgccccataaagaaggcataactcttaaggttgaaggagaatataatgaattttcaaatatcatgaatcagtttaaaataatcattatgatggctattattgttgtgtttggtattatggcttctcaatttgaatcttttttaaaaccctttattattatttttacaattcctttaacggcaataggggttgtgcttatacattttcttgcaggagaaaagctttctatttttgctgcaattggtatgcttatgcttgttggtgttgtggtaaatacaggaattgttcttgtagactatactggtttattgatcaagaggggatttggcctaagagaagcaattattgaatcttgtcgttcaaggcttaggccaattttaatgtcttctttgacctcaataatagggcttattccaatggcattttctagcggaagtggaaatgaacttctaaaaccaattgcatttacttttattggcggaatgacagctagcacatttcttactttgttttttattcccatgctttttgaaatttttccaacatgtttcaagtttcaaatctag

SEQ ID NO: 368 - DNA, 3024 bp, Borrelia burgdorferi
agattaaaagtagatcttttgccgggaattgacattccccaaataagtattcacactgtttatcctggcgcttctcctagagaagttgaagagagtgtttctagagtccttgagagtggcttgagttcggtaaagaatttaaaaaatatatatagtgtatcttccaaagaaagcagcaccgtttcacttgaattttatcatggaaccgatttagatttggttttaaatgaaattcgagatgctcttgaattggtaaaatcttcattgcccagcaaatcacagaccccaagaatttttagatacaatcttaaaaacatccctgtaatggaaattgttattaattctgtaaggccagtttctgagcttaaaagatatgccgatgaaatcattaaacctgggcttgaaaggcttgatggagttgcaattgttactgttaatggtggaagtaaaaagcgtgttttaattgaagtttctcaaaacaggctggagtcttatgggctttctttgtcaagaatatcttcaattatagcatcccaaaatttggaactttcagctggcaatatattggagaacaacttggaatatttggttgaagtttctggaaaatttaaatcaattgaagagataggtaatgtggtcatagcttataagatacccgacatttcttctggcataaatttatctcctattgagataaaactcaaagatattgctaatattaaaaccgattttgaagatttgtctgaatatgttgaatataatgggttgccttcaatttctttgtcggttcaaaaacgtagtgattctaattctattgcagtttctaatgttgttatgaatgaaatagaaaaattgaaattatctatgcctaaagatatgaaattggagattgcttctgatagtactgattttattaaagcatccatttcaacggttgtaaattcagcctattttggggccatgcttgcaatatttgttatttttttctttttaagaagctttagggccacaataattattggaatttctattccaatagcaattgttttgaccttttgtttaatgtattttgtaaatatttctcttaatattatgagtcttgcgggtcttgcacttgggattggaatggttgttgactgttcaattgttgtaatagacaatatatacaaatataggcaaaaaggagcaaagcttatttcgtcttctattctcggagctcaggagatgatgttgcctattacatcttcaacttttacttctatttgtgtttttggtccatttcttattttcaaatcagaacttggggtatatggagattttttcaaagactttacatttacgattgttatttccttgggtgtttctcttttagttgcaatttttttggttcctgttttatcaagccactatgtcggtttatacacaagtttccaaaagaatattaagaatgcttttattaggaaaatcgatgccttttttgctagtatttattattttttagagtttttgtatatcaatttattaaatatagttttaaatcacaaattgatttttgggttgattgttttttttagttttattggcagcttgcttttaggattattgttagatgtgacaacttttactagagggaaagagaactcaattactattaatttaaattttccccacaaaactaatttggaatatgcaaaattttattctaatagatttttagaaattgtaaaaagtgaggctaaaggatataaaagtattattgctactttgcgtgctgatagaataactttcaacgtattgtttcctctcaaagaagaatcaagagataatttaacccaaagcgtagattacgattctattaaatataaaattatgaatcgtattggtaatctttatcctgaatttaatattgagccttccattagtggcaatgctttaggtggtggagattctattaaaattaaaatttcggccaatgattttgaatatataaaagattatggaaaaattttagtttccatgttaaaaaaggaaattcccgaacttgtaaatccaaggcttagcataagtgattttcagcttcaaattggcgttgagatagacagagcgctagtttataattatggtattgacatgaataccattttaaatgagttgaaggccaatattaatggtgttgttgctgggcaatatgtggagaagggacttaattatgatattgttcttaagcttgatagaatggatgttaaaaatttaaaagatttagaaaaaatatttattacaaattcatctggagttaaaattcctttttcatcaatagccacctttgaaaaaaccaataaagccgaatctatttacagagaaaatcaagctttaaccatttatcttaatgcgggtatttctccagatgataatttaacccaagtaaccgcaaaagttgtagattttattaataataaggtgccccataaagaaggcataactcttaaggttgaaggagaatataatgaattttcaaatatcatgaatcagtttaaaataatcattatgatggctattattgttgtgtttggtattatggcttctcaatttgaatcttttttaaaaccctttattattatttttacaattcctttaacggcaataggggttgtgcttatacattttcttgcaggagaaaagctttctatttttgctgcaattggtatgcttatgcttgttggtgttgtggtaaatacaggaattgttcttgtagactatactggtttattgatcaagaggggatttggcctaagagaagcaattattgaatcttgtcgttcaaggcttaggccaattttaatgtcttctttgacctcaataatagggcttattccaatggcattttctagcggaagtggaaatgaacttctaaaaccaattgcatttacttttattggcggaatgacagctagcacatttcttactttgttttttattcccatgctttttgaaatttttccaacatgtttcaagtttcaaatctag

SEQ ID NO: 369 - protein, 129 aa, Borrelia burgdorferi
MLKNHSKLIIQLKVVMMIYLKKMGNDMTKFYNYRIEIVSNLSLELDVFECIEKIEQELGESIYYSKIGNVYGKGKKGEKHGNGVWPEENFILIIYTSNQSIVERLKDIVDDLNRSYPTEGINLFVLRNS

SEQ ID NO: 370 - protein, 109 aa, Borrelia burgdorferi
KKMGNDMTKFYNYRIEIVSNLSLELDVFECIEKIEQELGESIYYSKIGNVYGKGKKGEKHGNGVWPEENFILIIYTSNQSIVERLKDIVDDLNRSYPTEGINLFVLRNS

SEQ ID NO: 371 - DNA, 390 bp, Borrelia burgdorferi
atgttgaaaaatcattcaaaattaataattcaactaaaagtagttatgatgatttatttgaagaagatggggaatgatatgactaaattttataattataggattgaaatagtttctaacttatctttagagcttgatgtttttgaatgtatagaaaaaatagagcaagagttaggagagtctatatattattctaagataggaaatgtttatggaaaaggtaagaagggagaaaagcatggtaatggcgtttggcctgaagaaaattttattttgattatttatacctccaatcagtctattgttgagcgattaaaggatattgtggatgatttgaatcgttcttaccctacagaagggattaatctttttgttttgagaaattcttaa

SEQ ID NO: 372 - DNA, 330 bp, Borrelia burgdorferi
aagaagatggggaatgatatgactaaattttataattataggattgaaatagtttctaacttatctttagagcttgatgtttttgaatgtatagaaaaaatagagcaagagttaggagagtctatatattattctaagataggaaatgtttatggaaaaggtaagaagggagaaaagcatggtaatggcgtttggcctgaagaaaattttattttgattatttatacctccaatcagtctattgttgagcgattaaaggatattgtggatgatttgaatcgttcttaccctacagaagggattaatctttttgttttgagaaattcttaa

SEQ ID NO: 373 - protein, 625 aa, Borrelia burgdorferi
MLNNTYRIKTILTIFLAITLLTIYKYFTLMAFNNSPDNTISLKSNDIAKRGTIYDRNGKPIAFSSKSYSIGTNPQKIENIVSTSETLGAILQINSRILKEKLSSNKGFLYIKRKIKREESDLIKRIQAEGRLSNITLYPDYTRIYPFRNTTSNITGFVGTDNLGLEGIEFSLNSILGKDKTKQQFLNEEPETNNIHLTIDMDIQQGVSKIAKKYFKENNPESLITLVMNSQNGEILSMVQFPQYDANFYSKYPEEIRKNLSSSLTYEPGSINKIFTVAIILESGKLNLEEKFLDNGIYQKQFPSGEKITIKTLNPPYKHIDSTEILIYSSNVGIAYITEKVSNEYFYKKLLDFGFGEKVGVPFPGETKGLLNHYSKWSGRSKATIGFGQEIGVSAVQILQAASILSNNGIMLKPRIIKKISNDKGENIKEFDKEEIRKVISKNSAQKVLKMMREVVNKGGIPNLKIKNLDISAKSGTSQAIDRKTGKYSEEDYTSSILAIYPTEQPKYIIYIVYRYPKKIIYGTRIAAPMAKEIIEFIEHQQNTIAYKKIKMPSKIKIPKAETNYKNKTYLPNFINLSKREAIDILKYYKNTMKIKINGDGFVYKQSISPNTKLEDITELELYLK

SEQ ID NO: 374 - protein, 594 aa, Borrelia burgdorferi
FNNSPDNTISLKSNDIAKRGTIYDRNGKPIAFSSKSYSIGTNPQKIENIVSTSETLGAILQINSRILKEKLSSNKGFLYIKRKIKREESDLIKRIQAEGRLSNITLYPDYTRIYPFRNTTSNITGFVGTDNLGLEGIEFSLNSILGKDKTKQQFLNEEPETNNIHLTIDMDIQQGVSKIAKKYFKENNPESLITLVMNSQNGEILSMVQFPQYDANFYSKYPEEIRKNLSSSLTYEPGSINKIFTVAIILESGKLNLEEKFLDNGIYQKQFPSGEKITIKTLNPPYKHIDSTEILIYSSNVGIAYITEKVSNEYFYKKLLDFGFGEKVGVPFPGETKGLLNHYSKWSGRSKATIGFGQEIGVSAVQILQAASILSNNGIMLKPRIIKKISNDKGENIKEFDKEEIRKVISKNSAQKVLKMMREVVNKGGIPNLKIKNLDISAKSGTSQAIDRKTGKYSEEDYTSSILAIYPTEQPKYIIYIVYRYPKKIIYGTRIAAPMAKEIIEFIEHQQNTIAYKKIKMPSKIKIPKAETNYKNKTYLPNFINLSKREAIDILKYYKNTMKIKINGDGFVYKQSISPNTKLEDITELELYLK

SEQ ID NO: 375 - DNA, 1878 bp, Borrelia burgdorferi
atgcttaataacacttatcgaataaaaacaatattaacaatattcttggctataactttgttaactatttacaaatatttcacactaatggccttcaataacagcccagacaacacaatatctttaaagtcaaatgatattgccaaaagaggaacaatttatgatagaaatggcaaaccaatagcattctcttcaaaatcctactcaattggtacaaatcctcaaaaaatagaaaatattgtaagcacatctgaaactcttggtgcaatacttcaaattaattcaagaattttaaaggaaaagctttcctctaacaaagggtttttatatataaaaagaaaaataaaaagagaagaatcagatttaataaaaagaattcaagctgaaggcaggctttcaaacatcactttatatcctgattacacaagaatttatcccttcaggaataccacaagcaatattactggttttgtaggaacagataatcttggccttgagggcattgaattttccctaaatagcatattaggaaaagataaaaccaagcaacaatttttaaatgaggagccagaaacaaacaacatccacttaacaatagacatggatatacaacaaggtgttagcaaaatagctaaaaaatactttaaagaaaataatcctgaaagtttaattaccttggtaatgaactcccaaaatggagaaatattatccatggttcaatttcctcaatatgatgcaaacttttattctaaatatcctgaagaaatccgaaaaaacctttcttcatctctaacctatgagcccggaagcattaataaaatttttacagttgcaataatattagaaagtggaaaattaaatttagaagaaaaatttttagacaatggaatatatcaaaaacaatttccatcaggagaaaaaattacaatcaaaacattaaatcccccctataaacatatcgactctacagagattttaatttattcatcaaatgttggaatagcttacattactgaaaaagttagcaatgaatacttttataaaaaacttttagattttggctttggggaaaaagttggagttccatttcccggagaaacaaaaggactgctaaatcattattcaaaatggtcaggacgaagtaaagctacaattggatttggacaagaaataggagtgtcagcggttcaaatattacaagctgcaagcatactaagcaataatggaataatgctaaaacctagaataataaaaaaaataagcaacgataaaggagaaaatattaaagaatttgataaagaagaaataagaaaagtaatatccaaaaattcagcacaaaaagttttaaaaatgatgagagaagttgtaaataaaggtggaattccaaatcttaaaattaaaaatcttgacatttctgcaaaaagtggaacatctcaagctattgatagaaaaacgggaaaatactcagaagaagactatacatcttctatattggcaatataccccacagaacaaccaaaatatattatttacattgtatacagatacccaaaaaaaataatatacggaacaagaatagcagccccaatggcaaaagaaataatagaatttattgagcaccaacaaaatacaatagcatataaaaaaattaaaatgccatcaaaaatcaagatccctaaagctgaaactaattacaaaaacaaaacatacttaccaaattttatcaacctttctaaaagagaagcaatagacatactaaaatactataaaaatactatgaaaataaaaataaatggcgatggatttgtttacaagcaaagtatatcccccaatacaaaattagaagatataacagagcttgaactgtatttaaaataa

SEQ ID NO: 376 - DNA, 1785 bp, Borrelia burgdorferi
ttcaataacagcccagacaacacaatatctttaaagtcaaatgatattgccaaaagaggaacaatttatgatagaaatggcaaaccaatagcattctcttcaaaatcctactcaattggtacaaatcctcaaaaaatagaaaatattgtaagcacatctgaaactcttggtgcaatacttcaaattaattcaagaattttaaaggaaaagctttcctctaacaaagggtttttatatataaaaagaaaaataaaaagagaagaatcagatttaataaaaagaattcaagctgaaggcaggctttcaaacatcactttatatcctgattacacaagaatttatcccttcaggaataccacaagcaatattactggttttgtaggaacagataatcttggccttgagggcattgaattttccctaaatagcatattaggaaaagataaaaccaagcaacaatttttaaatgaggagccagaaacaaacaacatccacttaacaatagacatggatatacaacaaggtgttagcaaaatagctaaaaaatactttaaagaaaataatcctgaaagtttaattaccttggtaatgaactcccaaaatggagaaatattatccatggttcaatttcctcaatatgatgcaaacttttattctaaatatcctgaagaaatccgaaaaaacctttcttcatctctaacctatgagcccggaagcattaataaaatttttacagttgcaataatattagaaagtggaaaattaaatttagaagaaaaatttttagacaatggaatatatcaaaaacaatttccatcaggagaaaaaattacaatcaaaacattaaatcccccctataaacatatcgactctacagagattttaatttattcatcaaatgttggaatagcttacattactgaaaaagttagcaatgaatacttttataaaaaacttttagattttggctttggggaaaaagttggagttccatttcccggagaaacaaaaggactgctaaatcattattcaaaatggtcaggacgaagtaaagctacaattggatttggacaagaaataggagtgtcagcggttcaaatattacaagctgcaagcatactaagcaataatggaataatgctaaaacctagaataataaaaaaaataagcaacgataaaggagaaaatattaaagaatttgataaagaagaaataagaaaagtaatatccaaaaattcagcacaaaaagttttaaaaatgatgagagaagttgtaaataaaggtggaattccaaatcttaaaattaaaaatcttgacatttctgcaaaaagtggaacatctcaagctattgatagaaaaacgggaaaatactcagaagaagactatacatcttctatattggcaatataccccacagaacaaccaaaatatattatttacattgtatacagatacccaaaaaaaataatatacggaacaagaatagcagccccaatggcaaaagaaataatagaatttattgagcaccaacaaaatacaatagcatataaaaaaattaaaatgccatcaaaaatcaagatccctaaagctgaaactaattacaaaaacaaaacatacttaccaaattttatcaacctttctaaaagagaagcaatagacatactaaaatactataaaaatactatgaaaataaaaataaatggcgatggatttgtttacaagcaaagtatatcccccaatacaaaattagaagatataacagagcttgaactgtatttaaaataa

SEQ ID NO: 377 - protein, 203 aa, Borrelia burgdorferi
MAKNNLLVFFIAIIFVFVSIIVVFYNSLGKDYVKSGGEIVENLEKDLNDYLKENDAKEREKIFLRIRELISKEKEISSYFISRFYLARAVYFQSQAQYDEAIKDLDIVIKAKGIESEIAFLNKAAVYEKMGLKEDALLVYEDLINSTSLDFLKVRALLSKAILIEEKDKELAVKVYEEIVKFPYENNLYINMANNKILELKQN

SEQ ID NO: 378 - protein, 179 aa, Borrelia burgdorferi
YNSLGKDYVKSGGEIVENLEKDLNDYLKENDAKEREKIFLRIRELISKEKEISSYFISRFYLARAVYFQSQAQYDEAIKDLDIVIKAKGIESEIAFLNKAAVYEKMGLKEDALLVYEDLINSTSLDFLKVRALLSKAILIEEKDKELAVKVYEEIVKFPYENNLYINMANNKILELKQN

SEQ ID NO: 379 - DNA, 612 bp, Borrelia burgdorferi
atggctaaaaataatcttttagttttctttattgctattatttttgtgtttgtgtctattattgttgttttttataattctttaggcaaggattatgtaaagagtggcggagaaatagtagaaaatcttgaaaaagatttaaatgattatttaaaagaaaatgatgccaaagagagagaaaaaatatttcttaggataagggagcttatttcaaaggaaaaagaaatttcatcttattttatttcaaggttctatttagccagagctgtttatttccaaagtcaagcacagtatgatgaggctattaaagatttagatattgttattaaggcaaaaggtattgaaagtgaaattgcttttcttaataaagctgcagtttatgaaaaaatgggattaaaagaagatgctttgttagtttatgaagatcttatcaatagtactagtttggattttttaaaggtaagagctcttttgagtaaggcaatattgattgaggaaaaagataaagagcttgctgtgaaagtatacgaagagattgttaagtttccgtatgaaaataatttatatataaatatggcaaataataaaattttagaacttaagcaaaattaa

SEQ ID NO: 380 - DNA, 540 bp, Borrelia burgdorferi
tataattctttaggcaaggattatgtaaagagtggcggagaaatagtagaaaatcttgaaaaagatttaaatgattatttaaaagaaaatgatgccaaagagagagaaaaaatatttcttaggataagggagcttatttcaaaggaaaaagaaatttcatcttattttatttcaaggttctatttagccagagctgtttatttccaaagtcaagcacagtatgatgaggctattaaagatttagatattgttattaaggcaaaaggtattgaaagtgaaattgcttttcttaataaagctgcagtttatgaaaaaatgggattaaaagaagatgctttgttagtttatgaagatcttatcaatagtactagtttggattttttaaaggtaagagctcttttgagtaaggcaatattgattgaggaaaaagataaagagcttgctgtgaaagtatacgaagagattgttaagtttccgtatgaaaataatttatatataaatatggcaaataataaaattttagaacttaagcaaaattaa

SEQ ID NO: 381 - protein, 504 aa, Borrelia burgdorferi
MKAIGNAILLNMPLIFSIGISIGVARMGQGTAALGGLIGYLTFNITENYFIEAFSGLVEAETMSSVGRINFFGVQTLNTGIAGSLAVGLLVGYLHNKFYNMKLPKPFVFFSECHFVPIVIILPFCVFLAIFFCLIWSSFDDLIASLGLFVFRFEYFGSFLYGFLNRLLLPLGLHSILSFPFEFTSLGGVEIVNGDTVRGLKNIFYAQLLDPSLGKFSSGFAKISSGFYLSIMFGLPGAALGVYKGIVHEDKNKVAALLFSGALTAFLTGITEPLEFLFIFTAPLLYFVHAAYSGFALLLANFFNVTIGNSFSTGFLDFFMFGILQGNSKTNWISVLPLGAMFFALYYFTFSWLYRYFDFQIFVTDDPFFEGQEGKLESLGIAHLLIQGLGGFDNITKLDVCSTRLHVDVVNTELVDNNLLKEAGVLKIGLVNGKVQLFYGSNVYYIKNAIDTYSPKSLFEASVMVAVDNVKKGFKTYIEMKEDKKLEKQGKSGKTYKLSELEED

SEQ ID NO: 382 - protein, 479 aa, Borrelia burgdorferi
RMGQGTAALGGLIGYLTFNITENYFIEAFSGLVEAETMSSVGRINFFGVQTLNTGIAGSLAVGLLVGYLHNKFYNMKLPKPFVFFSECHFVPIVIILPFCVFLAIFFCLIWSSFDDLIASLGLFVFRFEYFGSFLYGFLNRLLLPLGLHSILSFPFEFTSLGGVEIVNGDTVRGLKNIFYAQLLDPSLGKFSSGFAKISSGFYLSIMFGLPGAALGVYKGIVHEDKNKVAALLFSGALTAFLTGITEPLEFLFIFTAPLLYFVHAAYSGFALLLANFFNVTIGNSFSTGFLDFFMFGILQGNSKTNWISVLPLGAMFFALYYFTFSWLYRYFDFQIFVTDDPFFEGQEGKLESLGIAHLLIQGLGGFDNITKLDVCSTRLHVDVVNTELVDNNLLKEAGVLKIGLVNGKVQLFYGSNVYYIKNAIDTYSPKSLFEASVMVAVDNVKKGFKTYIEMKEDKKLEKQGKSGKTYKLSELEED

SEQ ID NO: 383 - DNA, 1515 bp, Borrelia burgdorferi
atgaaggctataggcaatgctattcttctcaatatgcctttaattttttctattggaatttctattggagttgcaagaatggggcagggaacagcggctttgggaggccttattggttatttaacatttaatattactgaaaattattttattgaggctttttcagggcttgttgaagcagagacaatgtcttctgttgggcgtataaatttttttggtgttcaaactttaaatacgggaattgcaggttctttagcggtaggccttttagttggatatttgcataacaaattttataatatgaagctacccaaaccttttgtgtttttttcagagtgccattttgtgcctatagtaataattttacccttttgtgtttttttggctatatttttttgtttgatttggtcaagttttgacgatttaattgcatctttaggtttgtttgtttttaggtttgaatattttggcagttttctttatggatttttaaataggcttttattgcctttggggttgcattctattttatcttttccttttgagtttacttctttgggaggagtggagatagttaatggcgatactgttagaggtcttaagaatatattttatgctcagctattagacccatcacttggtaaattttcatcaggctttgccaaaattagcagtggattttatctatctattatgtttggactgcccggagcagcattaggggtttacaagggtattgttcatgaagataaaaataaggttgcagcacttcttttctctggggccttgacagcttttttaacaggaataactgagcctttagaatttttatttattttcacagcgcctttgctttattttgttcatgccgcttattcggggtttgcattgttgcttgctaatttttttaatgttacgattggcaatagcttttctactggatttttggatttttttatgtttgggatacttcaaggaaattctaagacaaattggattagtgtattacctttgggggcaatgttttttgctctttattattttacttttagttggctttatagatactttgattttcagatatttgttacagacgatccattttttgaaggccaagaaggaaagctagagagtctcggaattgcgcatcttttaattcaaggtcttggtggatttgataatattacaaagcttgatgtttgttctacaagattgcatgtagatgttgttaatactgagcttgttgataataatttgcttaaagaggctggagttcttaaaatagggcttgttaatggcaaggttcagcttttttatggatctaatgtttattatattaaaaatgccattgatacctattctccaaagagtctttttgaagctagtgttatggttgcagttgataatgtaaaaaaaggttttaaaacttatattgaaatgaaagaagacaaaaaacttgaaaagcaaggtaaatcaggaaaaacctataagcttagcgaattagaagaagattag

SEQ ID NO: 384 - DNA, 1440 bp, Borrelia burgdorferi
agaatggggcagggaacagcggctttgggaggccttattggttatttaacatttaatattactgaaaattattttattgaggctttttcagggcttgttgaagcagagacaatgtcttctgttgggcgtataaatttttttggtgttcaaactttaaatacgggaattgcaggttctttagcggtaggccttttagttggatatttgcataacaaattttataatatgaagctacccaaaccttttgtgtttttttcagagtgccattttgtgcctatagtaataattttacccttttgtgtttttttggctatatttttttgtttgatttggtcaagttttgacgatttaattgcatctttaggtttgtttgtttttaggtttgaatattttggcagttttctttatggatttttaaataggcttttattgcctttggggttgcattctattttatcttttccttttgagtttacttctttgggaggagtggagatagttaatggcgatactgttagaggtcttaagaatatattttatgctcagctattagacccatcacttggtaaattttcatcaggctttgccaaaattagcagtggattttatctatctattatgtttggactgcccggagcagcattaggggtttacaagggtattgttcatgaagataaaaataaggttgcagcacttcttttctctggggccttgacagcttttttaacaggaataactgagcctttagaatttttatttattttcacagcgcctttgctttattttgttcatgccgcttattcggggtttgcattgttgcttgctaatttttttaatgttacgattggcaatagcttttctactggatttttggatttttttatgtttgggatacttcaaggaaattctaagacaaattggattagtgtattacctttgggggcaatgttttttgctctttattattttacttttagttggctttatagatactttgattttcagatatttgttacagacgatccattttttgaaggccaagaaggaaagctagagagtctcggaattgcgcatcttttaattcaaggtcttggtggatttgataatattacaaagcttgatgtttgttctacaagattgcatgtagatgttgttaatactgagcttgttgataataatttgcttaaagaggctggagttcttaaaatagggcttgttaatggcaaggttcagcttttttatggatctaatgtttattatattaaaaatgccattgatacctattctccaaagagtctttttgaagctagtgttatggttgcagttgataatgtaaaaaaaggttttaaaacttatattgaaatgaaagaagacaaaaaacttgaaaagcaaggtaaatcaggaaaaacctataagcttagcgaattagaagaagattag

SEQ ID NO: 385 - protein, 454 aa, Borrelia burgdorferi
MRFKKIFLIIFIISNLKVYSYNYAIQYKNEGIDKYYFEILNDGFGFSLSDFFDDLRSGSLIFTYVSKYNFIINLEAHMLTYRGYKDSPKSLISRTDLIEIGFMYYFPILLLINGKNFGEIDLGIGVKNLLFGDWGGHLMQSIIHLILNQHRPIPSIKSYDSYNYRGFLSFALNYSYMNFLNLENYMDLSYFADYFIKNSIGITLKNENIGFDIKLYSQIQNQIKSLKTYSKTQEAETGIGINYQFYSKNFFITNNLNIKNFSTKENFLSVGGFGIIITPEEYKKISESNNEFNVISNNFYFGFDIMIPLKIRNSLFYKINENINHYFSISTNYYTNYNETNSFTNQLSSGIMYEFLPQKTFNPYLISGLFFAYNQNNKDIKSISRPIRIKNILQVGIENELGFLFKMLKYRNTEYIFKIYSKVNYIPIAYNLDEKKLEKHSINFNYLGIGIVVK

SEQ ID NO: 386 - protein, 436 aa, Borrelia burgdorferi
YSYNYAIQYKNEGIDKYYFEILNDGFGFSLSDFFDDLRSGSLIFTYVSKYNFIINLEAHMLTYRGYKDSPKSLISRTDLIEIGFMYYFPILLLINGKNFGEIDLGIGVKNLLFGDWGGHLMQSIIHLILNQHRPIPSIKSYDSYNYRGFLSFALNYSYMNFLNLENYMDLSYFADYFIKNSIGITLKNENIGFDIKLYSQIQNQIKSLKTYSKTQEAETGIGINYQFYSKNFFITNNLNIKNFSTKENFLSVGGFGIIITPEEYKKISESNNEFNVISNNFYFGFDIMIPLKIRNSLFYKINENINHYFSISTNYYTNYNETNSFTNQLSSGIMYEFLPQKTFNPYLISGLFFAYNQNNKDIKSISRPIRIKNILQVGIENELGFLFKMLKYRNTEYIFKIYSKVNYIPIAYNLDEKKLEKHSINFNYLGIGIVVK

SEQ ID NO: 387 - DNA, 1365 bp, Borrelia burgdorferi
atgcggtttaaaaaaatatttttaataatatttataatttctaatttaaaagtttattcttataattatgcaatccaatataaaaatgaaggtattgacaaatattattttgaaatactaaatgatggattcggattttcattaagcgatttttttgatgacttgagaagtggttctcttatttttacctatgtttcaaaatacaattttataataaatttagaagcacacatgttaacctataggggttataaagactctccgaaatctttaattagtagaacagacttaattgaaataggcttcatgtactattttccaattttattgctaattaatggaaaaaattttggagaaatagacttgggaattggagttaaaaacttattatttggagactggggagggcatttaatgcaaagcataattcacctcattttaaatcaacaccgtccaattccaagtataaaaagctacgacagctacaattatagaggatttttaagctttgctctaaattactcttacatgaattttttaaatttagaaaattatatggacttatcttattttgcagattattttattaaaaacagtattggaattaccttaaaaaatgaaaatattggatttgatataaaactttattcccaaattcaaaatcaaatcaaaagcctcaaaacatattcaaaaacacaagaagcagaaacaggaattggaataaattatcaattttactctaaaaattttttcataaccaataatttaaacattaaaaatttttcaaccaaagaaaatttcttaagcgttgggggatttggaataatcattacacctgaagaatacaaaaaaatatcagaatcaaataatgaatttaatgttataagtaataatttttactttggatttgatattatgatcccattaaaaataagaaattcattattttataaaataaatgaaaacatcaaccattacttttcaatatcaacaaattattacactaattataatgaaactaatagctttacaaatcaattatcatcaggcatcatgtatgaatttttaccacaaaaaacattcaatccttacctaatttcgggattattttttgcctataatcaaaacaataaagatatcaaaagcatctcaagaccaataagaataaaaaacattcttcaagttggaattgaaaatgaattaggatttttgttcaaaatgctaaaataccgcaacactgagtatattttcaaaatatattcaaaagttaactatattcctatagcttataacttagatgaaaaaaaattagaaaaacattctattaactttaattatttaggaattggaatagtcgttaaataa

SEQ ID NO: 388 - DNA, 1311 bp, Borrelia burgdorferi
tattcttataattatgcaatccaatataaaaatgaaggtattgacaaatattattttgaaatactaaatgatggattcggattttcattaagcgatttttttgatgacttgagaagtggttctcttatttttacctatgtttcaaaatacaattttataataaatttagaagcacacatgttaacctataggggttataaagactctccgaaatctttaattagtagaacagacttaattgaaataggcttcatgtactattttccaattttattgctaattaatggaaaaaattttggagaaatagacttgggaattggagttaaaaacttattatttggagactggggagggcatttaatgcaaagcataattcacctcattttaaatcaacaccgtccaattccaagtataaaaagctacgacagctacaattatagaggatttttaagctttgctctaaattactcttacatgaattttttaaatttagaaaattatatggacttatcttattttgcagattattttattaaaaacagtattggaattaccttaaaaaatgaaaatattggatttgatataaaactttattcccaaattcaaaatcaaatcaaaagcctcaaaacatattcaaaaacacaagaagcagaaacaggaattggaataaattatcaattttactctaaaaattttttcataaccaataatttaaacattaaaaatttttcaaccaaagaaaatttcttaagcgttgggggatttggaataatcattacacctgaagaatacaaaaaaatatcagaatcaaataatgaatttaatgttataagtaataatttttactttggatttgatattatgatcccattaaaaataagaaattcattattttataaaataaatgaaaacatcaaccattacttttcaatatcaacaaattattacactaattataatgaaactaatagctttacaaatcaattatcatcaggcatcatgtatgaatttttaccacaaaaaacattcaatccttacctaatttcgggattattttttgcctataatcaaaacaataaagatatcaaaagcatctcaagaccaataagaataaaaaacattcttcaagttggaattgaaaatgaattaggatttttgttcaaaatgctaaaataccgcaacactgagtatattttcaaaatatattcaaaagttaactatattcctatagcttataacttagatgaaaaaaaattagaaaaacattctattaactttaattatttaggaattggaatagtcgttaaataa

SEQ ID NO: 389 - protein, 336 aa, Borrelia burgdorferi
MKSFLFWVILGTVGISSFAQNTPVAIINLYKNEIITKTGFDSKVDIFKKTQGRDLTDAEKKQVLQVLIADVLFSQEASKQGIKISDDEVMQTIRTQFGLVNFTDEQIKQMIEKQGTNWGELLSSMKRSLSSQKLVLKQAQPKFSEIKTPSEKEIVEYYEANKTKFVNPDISRVSHIFFSTKDKKRSDVLDQAKNILSQIRSKKITFEEAVRKYSNDESSKAKNGDLGFLSRGDQNAQNLLGADFVKEVFNFNKGDISSPIASKEGFHIVKVTEKYAQRFLGLNDKVSPTADLIVKDAIRNNMINVQQQQIVVQVQQDMYGKLNKSANIQILDSSLK

SEQ ID NO: 390 - protein, 317 aa, Borrelia burgdorferi
QNTPVAIINLYKNEIITKTGFDSKVDIFKKTQGRDLTDAEKKQVLQVLIADVLFSQEASKQGIKISDDEVMQTIRTQFGLVNFTDEQIKQMIEKQGTNWGELLSSMKRSLSSQKLVLKQAQPKFSEIKTPSEKEIVEYYEANKTKFVNPDISRVSHIFFSTKDKKRSDVLDQAKNILSQIRSKKITFEEAVRKYSNDESSKAKNGDLGFLSRGDQNAQNLLGADFVKEVFNFNKGDISSPIASKEGFHIVKVTEKYAQRFLGLNDKVSPTADLIVKDAIRNNMINVQQQQIVVQVQQDMYGKLNKSANIQILDSSLK

SEQ ID NO: 391 - DNA, 1011 bp, Borrelia burgdorferi
atgaagagttttttattttgggtaatattgggaactgtagggattagctcttttgctcaaaatactcctgttgctattattaatttatataagaatgaaattattactaaaactggttttgattctaaggttgatatatttaaaaagacccaaggtagagacttaactgatgctgagaaaaagcaagttctgcaagttttaatagcagatgttctttttagtcaagaggcttcaaagcaaggaattaaaatctcagatgatgaggttatgcaaacaattagaactcaatttgggcttgtgaattttactgatgaacaaatcaagcaaatgatagaaaaacaaggtacaaattggggcgagcttttgtcttcaatgaaaagatctctgtcttctcaaaagcttgttttaaagcaagctcagcctaagttttctgaaattaaaactcctagtgagaaagaaattgttgagtattatgaggctaataaaactaagtttgtaaatcccgatatttcaagagttagtcatatctttttttctactaaagataaaaaaagatcagatgttttagatcaagcaaaaaatattttaagccaaataagatcaaaaaaaattacttttgaagaagctgtaagaaaatattcaaatgacgaatcttctaaggctaaaaatggtgatcttgggtttttatcaagaggtgatcaaaatgctcaaaatcttcttggagccgattttgtgaaagaggtttttaattttaataagggtgatatatcttcgcctattgcttcaaaggaagggtttcatattgttaaagttacagaaaaatatgctcagagatttttaggtttgaatgataaagtgtctcctactgcagatttgattgtcaaagatgcaataagaaataacatgattaatgttcaacaacagcaaattgttgttcaagtacagcaagatatgtatggtaagcttaacaagtctgcaaatatacaaatcttggattctagtctaaaataa

SEQ ID NO: 392 - DNA, 954 bp, Borrelia burgdorferi
caaaatactcctgttgctattattaatttatataagaatgaaattattactaaaactggttttgattctaaggttgatatatttaaaaagacccaaggtagagacttaactgatgctgagaaaaagcaagttctgcaagttttaatagcagatgttctttttagtcaagaggcttcaaagcaaggaattaaaatctcagatgatgaggttatgcaaacaattagaactcaatttgggcttgtgaattttactgatgaacaaatcaagcaaatgatagaaaaacaaggtacaaattggggcgagcttttgtcttcaatgaaaagatctctgtcttctcaaaagcttgttttaaagcaagctcagcctaagttttctgaaattaaaactcctagtgagaaagaaattgttgagtattatgaggctaataaaactaagtttgtaaatcccgatatttcaagagttagtcatatctttttttctactaaagataaaaaaagatcagatgttttagatcaagcaaaaaatattttaagccaaataagatcaaaaaaaattacttttgaagaagctgtaagaaaatattcaaatgacgaatcttctaaggctaaaaatggtgatcttgggtttttatcaagaggtgatcaaaatgctcaaaatcttcttggagccgattttgtgaaagaggtttttaattttaataagggtgatatatcttcgcctattgcttcaaaggaagggtttcatattgttaaagttacagaaaaatatgctcagagatttttaggtttgaatgataaagtgtctcctactgcagatttgattgtcaaagatgcaataagaaataacatgattaatgttcaacaacagcaaattgttgttcaagtacagcaagatatgtatggtaagcttaacaagtctgcaaatatacaaatcttggattctagtctaaaataa

SEQ ID NO: 393 - protein, 173 aa, Borrelia burgdorferi
MKLPKLYKLILLFLFTTRLFSVKDEKSDNKLELFSNVETKIKKNSKNYDSNSNSKKIKKESILKRDTNSEKNINSNIYIQKSKKINYPNRNLGNNINQKTANDVNFTKTSYVKVYPNYKDDNFQEIKNANKFPAKTEKTHMLIGPILKDNLGIIIKMLKTKGYTLIEYIEDNN

SEQ ID NO: 394 - protein, 80 aa, Borrelia burgdorferi
VKDEKSDNKLELFSNVETKIKKNSKNYDSNSNSKKIKKESILKRDTNSEKNINSNIYIQKSKKINYPNRNLGNNINQKTA

SEQ ID NO: 395 - DNA, 522 bp, Borrelia burgdorferi
atgaaattaccaaaactttacaaattaatactactctttctttttacaacaagattgttttcagtaaaagatgaaaaatcagacaataaattggaattattttcaaacgtagaaacaaaaatcaaaaaaaattctaaaaattacgactcaaattcaaacagcaaaaagatcaaaaaagaatcaattttaaaaagagatacaaacagcgaaaaaaatataaattccaatatatacatacaaaaatcaaaaaaaattaattaccccaacagaaatttaggcaataatatcaatcaaaaaactgcaaatgatgtaaattttacaaaaactagttatgttaaagtttatcccaactataaagacgataactttcaagaaattaaaaatgctaataaatttccagctaaaaccgaaaaaactcacatgctaatcggcccaatattaaaagataatctaggaataataattaaaatgctaaaaacaaagggatacactttaatagaatacatagaggacaataattaa

SEQ ID NO: 396 - DNA, 459 bp, Borrelia burgdorferi
gtaaaagatgaaaaatcagacaataaattggaattattttcaaacgtagaaacaaaaatcaaaaaaaattctaaaaattacgactcaaattcaaacagcaaaaagatcaaaaaagaatcaattttaaaaagagatacaaacagcgaaaaaaatataaattccaatatatacatacaaaaatcaaaaaaaattaattaccccaacagaaatttaggcaataatatcaatcaaaaaactgcaaatgatgtaaattttacaaaaactagttatgttaaagtttatcccaactataaagacgataactttcaagaaattaaaaatgctaataaatttccagctaaaaccgaaaaaactcacatgctaatcggcccaatattaaaagataatctaggaataataattaaaatgctaaaaacaaagggatacactttaatagaatacatagaggacaataattaa

SEQ ID NO: 397 - protein, 261 aa, Borrelia burgdorferi
MKNFKEVIIIFDSGIGGLSYFKYIKSRIGGCQYVYVADNKNFPYGEKSPEYLLEAVLFLIEKLKKIYNIGALVLACNTISVSVYNKLNFVFPVVYTLPDVSSVSDLVLKRVLLIATNTTLESKFVKDQVNIHNDLIVKAAGELVNFVEYGENYKKYALRCLEALKFEVVNTGREIVFLGCTHYLHLKVMIEDFLKIPVYENRELVVKNLIRSMNFSEHKGNYYKNDFDFVDDEFYLTENKNLTFYQNFCKKYNLRFKGMIV

SEQ ID NO: 398 - protein, 235 aa, Borrelia burgdorferi
RIGGCQYVYVADNKNFPYGEKSPEYLLEAVLFLIEKLKKIYNIGALVLACNTISVSVYNKLNFVFPVVYTLPDVSSVSDLVLKRVLLIATNTTLESKFVKDQVNIHNDLIVKAAGELVNFVEYGENYKKYALRCLEALKFEVVNTGREIVFLGCTHYLHLKVMIEDFLKIPVYENRELVVKNLIRSMNFSEHKGNYYKNDFDFVDDEFYLTENKNLTFYQNFCKKYNLRFKGMIV

SEQ ID NO: 399 - DNA, 786 bp, Borrelia burgdorferi
atgaaaaatttcaaagaagtaataattatttttgattcaggaataggagggctttcttattttaaatatattaaaagtagaatagggggatgccaatatgtttatgttgccgataataaaaatttcccttatggagaaaaaagtcctgaatatcttctagaagcagttttgtttttgattgagaagcttaaaaaaatctataatattggtgcattagttttggcttgtaatacaatttctgttagtgtatacaataaattaaattttgtttttccagtagtctatactttgccagatgtaagttcagtttcagatcttgttttaaaaagagttcttttgattgcaacaaatactactcttgaaagcaaatttgttaaggatcaagtaaatatacataatgatttgattgtaaaagctgctggagagcttgttaattttgttgaatatggagagaattacaaaaaatatgctcttagatgtttagaagctttaaaatttgaagttgtaaatactggtagagaaattgtttttcttggatgcacgcattatttgcatcttaaggtaatgatagaagattttttaaaaattcctgtttatgagaatcgtgaattagtggtaaaaaatcttattagatcaatgaatttttctgaacacaaaggtaattattataagaatgattttgattttgtagatgatgagttttatttgaccgaaaataaaaatttgactttttatcaaaatttttgcaaaaaatataatcttcgctttaagggaatgatagtttga

SEQ ID NO: 400 - DNA, 708 bp, Borrelia burgdorferi
agaatagggggatgccaatatgtttatgttgccgataataaaaatttcccttatggagaaaaaagtcctgaatatcttctagaagcagttttgtttttgattgagaagcttaaaaaaatctataatattggtgcattagttttggcttgtaatacaatttctgttagtgtatacaataaattaaattttgtttttccagtagtctatactttgccagatgtaagttcagtttcagatcttgttttaaaaagagttcttttgattgcaacaaatactactcttgaaagcaaatttgttaaggatcaagtaaatatacataatgatttgattgtaaaagctgctggagagcttgttaattttgttgaatatggagagaattacaaaaaatatgctcttagatgtttagaagctttaaaatttgaagttgtaaatactggtagagaaattgtttttcttggatgcacgcattatttgcatcttaaggtaatgatagaagattttttaaaaattcctgtttatgagaatcgtgaattagtggtaaaaaatcttattagatcaatgaatttttctgaacacaaaggtaattattataagaatgattttgattttgtagatgatgagttttatttgaccgaaaataaaaatttgactttttatcaaaatttttgcaaaaaatataatcttcgctttaagggaatgatagtttga

SEQ ID NO: 401 - protein, 216 aa, Borrelia burgdorferi
MIRLKVLILCLFGIFVLNGFADTNFEFNFGGGVAFPVSPFSSFYNEALEINAKLKQNLPSDLSPIEKEEIVQNFSDLANIAKAGIRYGTYAQFGAKFDDFVSIGFELLFNINLLKAIKRSDGTANENFSFIMAITPRFYTKLDFFVLALAFFTGPKINIATSSADSVLAELGTMGWDIGARLSFSFLILEGYYVWNIKNPKFSDFKFGIGFEFGIV

SEQ ID NO: 402 - protein, 195 aa, Borrelia burgdorferi
DTNFEFNFGGGVAFPVSPFSSFYNEALEINAKLKQNLPSDLSPIEKEEIVQNFSDLANIAKAGIRYGTYAQFGAKFDDFVSIGFELLFNINLLKAIKRSDGTANENFSFIMAITPRFYTKLDFFVLALAFFTGPKINIATSSADSVLAELGTMGWDIGARLSFSFLILEGYYVWNIKNPKFSDFKFGIGFEFGIV

SEQ ID NO: 403 - DNA, 651 bp, Borrelia burgdorferi
atgattaggcttaaagttttaattttgtgtttatttgggatttttgtgttaaatggttttgcagatactaattttgaattcaattttggtggtggggttgcttttcctgttagtcccttttcaagcttttacaatgaggctttagagattaatgcaaagcttaagcaaaatttgccttcagatttatccccaatagaaaaagaagagatagtccaaaatttttccgatttagccaatattgctaaagctggaataagatatggaacttacgctcaatttggcgctaaatttgatgattttgtttctattggatttgagcttttgtttaacattaatcttcttaaagcaataaagcgttcggatggaactgcaaatgaaaatttctcgtttattatggcaataacaccaagattttatacaaaattagatttttttgttttagctttagcgtttttcacaggtcctaagatcaatatagcgacttcttctgcggattctgttttagcagaactgggaacaatgggctgggatattggtgctagactttcattttcttttttaattcttgaagggtactatgtttggaatattaaaaaccctaaattttctgatttcaagtttggaataggttttgaatttggaattgtgtag

SEQ ID NO: 404 - DNA, 588 bp, Borrelia burgdorferi
gatactaattttgaattcaattttggtggtggggttgcttttcctgttagtcccttttcaagcttttacaatgaggctttagagattaatgcaaagcttaagcaaaatttgccttcagatttatccccaatagaaaaagaagagatagtccaaaatttttccgatttagccaatattgctaaagctggaataagatatggaacttacgctcaatttggcgctaaatttgatgattttgtttctattggatttgagcttttgtttaacattaatcttcttaaagcaataaagcgttcggatggaactgcaaatgaaaatttctcgtttattatggcaataacaccaagattttatacaaaattagatttttttgttttagctttagcgtttttcacaggtcctaagatcaatatagcgacttcttctgcggattctgttttagcagaactgggaacaatgggctgggatattggtgctagactttcattttcttttttaattcttgaagggtactatgtttggaatattaaaaaccctaaattttctgatttcaagtttggaataggttttgaatttggaattgtgtag

SEQ ID NO: 405 - protein, 232 aa, Borrelia burgdorferi
MIDLTQEKQEILIKNKFLAKVFGLMSIGLLISAVFAYATSENQTIKAIIFSNSMSFMAMILIQFGLVYAISGALNKISSNTATALFLLYSALTGVTLSSIFMIYTQGSIVFTFGITAGTFLGMSVYGYTTTTDLTKMGSYLIMGLWGIIIASLVNMFFRSSGLNFLISILGVVIFTGLTAYDVQNISKMDKMLQDDTEIKNRMAVVASLKLYLDFINLFLYLLRFLGQRRND

SEQ ID NO: 406 - protein, 194 aa, Borrelia burgdorferi
TSENQTIKAIIFSNSMSFMAMILIQFGLVYAISGALNKISSNTATALFLLYSALTGVTLSSIFMIYTQGSIVFTFGITAGTFLGMSVYGYTTTTDLTKMGSYLIMGLWGIIIASLVNMFFRSSGLNFLISILGVVIFTGLTAYDVQNISKMDKMLQDDTEIKNRMAVVASLKLYLDFINLFLYLLRFLGQRRND

SEQ ID NO: 407 - DNA, 699 bp, Borrelia burgdorferi
atgatcgatttaacacaagaaaaacaagaaatactaataaaaaacaagtttttagccaaagttttcgggcttatgtcaattggacttttaatctcagcagtatttgcatatgcaacctcagaaaatcaaacaatcaaagcaataatattctcaaattcaatgtcatttatggctatgatacttatacaatttggacttgtatatgcaataagtggtgctcttaataaaatatcaagcaatactgcaacagctcttttcttgctctactcagcactaacaggagtaacattatcttctatatttatgatttacacacaaggatcaatagtattcacattcggaattactgctggaacatttcttggaatgtctgtttatggatacactacaacaacagatctaacaaaaatgggaagctatttaataatgggcttatggggaatcattattgcatctcttgttaatatgttttttagaagctcaggtcttaatttccttatatctattttgggcgtagttatatttacaggcttaacagcttatgatgttcaaaatatttctaaaatggacaaaatgctacaagacgacactgaaataaaaaacagaatggcggttgtagcctcacttaaactttatttagattttataaatttattcttatatcttctaagatttttgggccaaagaagaaacgattaa

SEQ ID NO: 408 - DNA, 585 bp, Borrelia burgdorferi
acctcagaaaatcaaacaatcaaagcaataatattctcaaattcaatgtcatttatggctatgatacttatacaatttggacttgtatatgcaataagtggtgctcttaataaaatatcaagcaatactgcaacagctcttttcttgctctactcagcactaacaggagtaacattatcttctatatttatgatttacacacaaggatcaatagtattcacattcggaattactgctggaacatttcttggaatgtctgtttatggatacactacaacaacagatctaacaaaaatgggaagctatttaataatgggcttatggggaatcattattgcatctcttgttaatatgttttttagaagctcaggtcttaatttccttatatctattttgggcgtagttatatttacaggcttaacagcttatgatgttcaaaatatttctaaaatggacaaaatgctacaagacgacactgaaataaaaaacagaatggcggttgtagcctcacttaaactttatttagattttataaatttattcttatatcttctaagatttttgggccaaagaagaaacgattaa

SEQ ID NO: 409 - protein, 214 aa, Borrelia burgdorferi
MKFFFLLQIALILLSNSSLLFGQSPPKEKEDSLLLYKEGKFKEAILNTLEEIRLNPSNLDARTILIWSLIAIGEYKRAEKEAIIGLGIKKHDIRIIQALGEAYFFQKNYDNALKYFQEYISLDSKGARIIKVYNLIADSFYELKRYNEADFAYEHALRFSPNNQNLLIKLARSRINAKNKILAEEALIKILTISPNNLEAKNLLEELKKSNNKP

SEQ ID NO: 410 - protein, 185 aa, Borrelia burgdorferi
EDSLLLYKEGKFKEAILNTLEEIRLNPSNLDARTILIWSLIAIGEYKRAEKEAIIGLGIKKHDIRIIQALGEAYFFQKNYDNALKYFQEYISLDSKGARIIKVYNLIADSFYELKRYNEADFAYEHALRFSPNNQNLLIKLARSRINAKNKILAEEALIKILTISPNNLEAKNLLEELKKSNNKP

SEQ ID NO: 411 - DNA, 645 bp, Borrelia burgdorferi
atgaaatttttttttctattacaaatagctttaattctactatccaattcaagcttgttatttggacaatcaccgcctaaagaaaaagaagactctcttcttctatataaagaaggaaaatttaaagaagctattttaaacacgttagaagaaattcgactaaatcctagtaacttagatgctaggacaatattgatatggagcttaatagccataggagaatacaagagagctgaaaaagaggcgattataggacttggcattaaaaaacatgacataagaattattcaagcactaggagaagcttatttctttcaaaaaaattatgacaatgcattaaaatactttcaagaatacattagccttgattctaaaggagcaagaataataaaagtttataatttaattgcagattctttttatgagctaaaaagatataatgaagccgattttgcatacgaacatgcattacgtttttctcctaataaccaaaatctattaataaaattagcaagatcaagaataaatgcaaaaaataaaatattagcagaagaagcactaattaaaattcttacaatctctcctaataatctagaggcaaaaaatttactagaagaattaaaaaaaagcaacaacaaaccttga

SEQ ID NO: 412 - DNA, 558 bp, Borrelia burgdorferi
gaagactctcttcttctatataaagaaggaaaatttaaagaagctattttaaacacgttagaagaaattcgactaaatcctagtaacttagatgctaggacaatattgatatggagcttaatagccataggagaatacaagagagctgaaaaagaggcgattataggacttggcattaaaaaacatgacataagaattattcaagcactaggagaagcttatttctttcaaaaaaattatgacaatgcattaaaatactttcaagaatacattagccttgattctaaaggagcaagaataataaaagtttataatttaattgcagattctttttatgagctaaaaagatataatgaagccgattttgcatacgaacatgcattacgtttttctcctaataaccaaaatctattaataaaattagcaagatcaagaataaatgcaaaaaataaaatattagcagaagaagcactaattaaaattcttacaatctctcctaataatctagaggcaaaaaatttactagaagaattaaaaaaaagcaacaacaaaccttga

SEQ ID NO: 413 - protein, 1494 aa, Borrelia burgdorferi
MKKANFLSTNFLILLLVCFVNVNLFSKDIFKFKLVDQFFPFYYKNNKGEYEGLIFSILDKWAKDNNADIMVEHIDNLNESEIEDEAIYLGLTYNVKLNDFFYFKSELARSISILFFKNSNKKYKNTHSTFLSNFNIGVIKNTIYEDILRLKNVNTIFLADNSQELVLALKNDKVDYIYGDCKTLHYIANNFLSEDLVIFTGDVFYSIKNRVAISRNAPEIVKNLNLDLFSYLMKMPEELVFSFLDSNAKGSFVDVGLYNDYPPLSFINSQGKLSGILVDLWNLLSRQHIFKPIFKGFSKEDIKKSLDGKSVGIFGGIISNDSVLENVNYVVSKPIYPLNFKFYSKDLSNDAGPINSQFIDFNFNNIQLNKNKDIVNNFIDIVNNSYGFIENSITTKYLLKLNGYNGRLKSYDSIFNKNRFLVLAIDNRIYKVIKYILNSIFDDISFESLLQIDKNWLDKEEINSSRINSYKIMNKVKFNIEEKIWLSKNNKLNLAVKNWYPIDYVEANNYKGINQFLLDKIRMFSGLRFNIIKVHSSLDLKKLIKSGKIDMLNTNATDSNLDNVFNIKLNSRIPLYIFSNKKRVLPSRSLEKFAILDFLYSKNLASNIKSKLILVSSFNEALLLLYKGKVDGIISDEYTAAAVFEELNIDDVEKIPTFRDLAFDLSLAIYNQDYILKEIIQKVVMRSNVDSQMYLNDWKFDIYYKSRSIRFKNFKFLVITFIIFYFTFLGFVIIFMFRLSFEQKRRYSFVMNEKKIAEAANAAKTIFIANVSHDIRTPINGIMAATELLDTTILTDVQKDYVRMINYSSDSLLSLIDDILYLSKIDVNELYVESQEIDLESEMEMVLKAFQSQCAKKNIDLFSYSKSIFNNYIKGDIVKIKQVLINLIGNAFKFTDDGVIVLNYEEVCRTRTDGNRVLVTVEFKVIDTGKGIEKENFSKIFEIFKQEDDSSSRVHEGAGLGLSISRELIRLMGGLGIAVDSKVGEGTTFSFMLPFLLGSELKSKKLSINRFQSVNGDNKVLNVLLSQKSIKIFEHCSILLGCSSNVRYVASFEDAYKVFKKYPSYNFVYINVNNDNIQEGIRLANNIERLNSDVQIIFLFYYLDNKALKNLKYGYVKKPLMGLGICSILYKKEFNPEMDFEDLVPIDSALRIKEPINVLIAEDNQVNQKVLKDILVVIGINENFIDVVDDGVKALKSLKDKKYTISFIDIRMPRYDGFSVAKEIRKFEKAKNLKPCVLVAVTAHALQEYKDKCLASGMNDYISKPIHISSIKTILKKYLQFEVDDIGENENLNQLVKFPNLDVNRALKELNLSYVSYSELCRGLVDFISINIIDLEKAFDEEDLSLIKDISHSISGALSNMRSELYKDFQKIETSKDSISELKKMYSFVKDDLFQLISDIKENILFESEIVSENKLYFKNNDQFLNLLNKLLIGIKTRKPREYKEILESINKYVLDDNIQVLFSDLRRNLRLYRFAESSKILEEIIEMLNNKRY

SEQ ID NO: 414 - protein, 1477 aa, Borrelia burgdorferi
CFVNVNLFSKDIFKFKLVDQFFPFYYKNNKGEYEGLIFSILDKWAKDNNADIMVEHIDNLNESEIEDEAIYLGLTYNVKLNDFFYFKSELARSISILFFKNSNKKYKNTHSTFLSNFNIGVIKNTIYEDILRLKNVNTIFLADNSQELVLALKNDKVDYIYGDCKTLHYIANNFLSEDLVIFTGDVFYSIKNRVAISRNAPEIVKNLNLDLFSYLMKMPEELVFSFLDSNAKGSFVDVGLYNDYPPLSFINSQGKLSGILVDLWNLLSRQHIFKPIFKGFSKEDIKKSLDGKSVGIFGGIISNDSVLENVNYVVSKPIYPLNFKFYSKDLSNDAGPINSQFIDFNFNNIQLNKNKDIVNNFIDIVNNSYGFIENSITTKYLLKLNGYNGRLKSYDSIFNKNRFLVLAIDNRIYKVIKYILNSIFDDISFESLLQIDKNWLDKEEINSSRINSYKIMNKVKFNIEEKIWLSKNNKLNLAVKNWYPIDYVEANNYKGINQFLLDKIRMFSGLRFNIIKVHSSLDLKKLIKSGKIDMLNTNATDSNLDNVFNIKLNSRIPLYIFSNKKRVLPSRSLEKFAILDFLYSKNLASNIKSKLILVSSFNEALLLLYKGKVDGIISDEYTAAAVFEELNIDDVEKIPTFRDLAFDLSLAIYNQDYILKEIIQKVVMRSNVDSQMYLNDWKFDIYYKSRSIRFKNFKFLVITFIIFYFTFLGFVIIFMFRLSFEQKRRYSFVMNEKKIAEAANAAKTIFIANVSHDIRTPINGIMAATELLDTTILTDVQKDYVRMINYSSDSLLSLIDDILYLSKIDVNELYVESQEIDLESEMEMVLKAFQSQCAKKNIDLFSYSKSIFNNYIKGDIVKIKQVLINLIGNAFKFTDDGVIVLNYEEVCRTRTDGNRVLVTVEFKVIDTGKGIEKENFSKIFEIFKQEDDSSSRVHEGAGLGLSISRELIRLMGGLGIAVDSKVGEGTTFSFMLPFLLGSELKSKKLSINRFQSVNGDNKVLNVLLSQKSIKIFEHCSILLGCSSNVRYVASFEDAYKVFKKYPSYNFVYINVNNDNIQEGIRLANNIERLNSDVQIIFLFYYLDNKALKNLKYGYVKKPLMGLGICSILYKKEFNPEMDFEDLVPIDSALRIKEPINVLIAEDNQVNQKVLKDILVVIGINENFIDVVDDGVKALKSLKDKKYTISFIDIRMPRYDGFSVAKEIRKFEKAKNLKPCVLVAVTAHALQEYKDKCLASGMNDYISKPIHISSIKTILKKYLQFEVDDIGENENLNQLVKFPNLDVNRALKELNLSYVSYSELCRGLVDFISINIIDLEKAFDEEDLSLIKDISHSISGALSNMRSELYKDFQKIETSKDSISELKKMYSFVKDDLFQLISDIKENILFESEIVSENKLYFKNNDQFLNLLNKLLIGIKTRKPREYKEILESINKYVLDDNIQVLFSDLRRNLRLYRFAESSKILEEIIEMLNNKRY

SEQ ID NO: 415 - DNA, 4485 bp, Borrelia burgdorferi
atgaaaaaagcaaactttttaagtactaattttttaattttacttttggtttgctttgtcaacgtcaatttattttctaaggatattttcaagtttaagcttgtagatcaattttttcctttttactacaagaataataaaggagaatatgaaggacttattttttctattttagataaatgggcaaaagataataatgctgatattatggttgagcatattgataatttaaatgaaagtgaaattgaagacgaagcaatatatttaggattaacttataatgtaaaattaaatgattttttttattttaaaagtgagcttgctaggagtatttcaattttattttttaaaaactctaataaaaaatataaaaatacccattcaacatttttatccaattttaatataggagttattaaaaatacaatatatgaagatatcttaaggttaaaaaacgttaacaccatttttttggctgataattctcaagagttagtattggccttaaaaaacgataaagttgattatatatatggtgattgcaagactttacattatattgcaaataactttttaagtgaagatcttgtgatttttaccggggatgttttttatagtatcaaaaatagagtggctattagtagaaatgctcctgagatagtaaagaatttgaatttagatttgttttcatatttaatgaaaatgcctgaggaacttgttttttcttttttagatagcaatgctaagggaagttttgttgatgttggtttatataatgattatcctcctttaagttttattaattcacagggaaaattgtctggcattttagtggatttgtggaatcttctctcaagacaacatatctttaaacctatttttaagggattttccaaagaggatattaagaaatcattagatggaaaatcagtaggtatttttggaggaattattagcaatgatagtgtgttggaaaatgttaattatgtagtaagtaagccaatatatcctcttaattttaaattttattctaaagacctaagcaatgatgctggtccaataaattctcagtttattgattttaattttaataatattcaattaaataagaataaagatattgttaataactttatagatattgttaataattcatatgggtttatagaaaattcaataacaacaaaatatttgttaaaattaaatggatataacggtagattaaaatcttacgattcgatttttaataaaaataggtttttagtattagccattgataataggatttataaggttattaaatatattctcaattctatatttgatgatatttcatttgaatctttgcttcaaatagataaaaattggttggataaagaagagattaatagttctagaataaatagttataaaattatgaataaggttaaatttaatatagaagaaaaaatttggttatcaaaaaataataaattaaatcttgctgttaaaaattggtatccaatagattatgttgaggcaaataattataaaggaataaatcaatttttgcttgataagattagaatgttttcaggtttgagatttaacataattaaagtacacagcagtttagatcttaaaaaattaatcaaatctggaaaaatcgatatgctaaatactaatgcaaccgattcaaatttagataatgttttcaacataaaattaaattctcgaattccactttatattttttcaaataagaaaagggtgcttccatctagatctttagaaaagtttgctatacttgattttttatatagtaaaaatttggcttctaatattaaatcaaagcttattctggtaagcagttttaatgaagcgttgcttcttctttataagggaaaggtagatgggattattagcgatgagtatacagctgctgctgtttttgaggaattaaatattgatgatgttgaaaaaattcctacttttagagatttggcttttgatttgagtcttgctatttataatcaagattatatcttgaaagaaattattcaaaaagttgttatgcgttcaaatgttgacagtcagatgtatttaaatgattggaaatttgatatttattataaatccagaagtatcaggtttaaaaatttcaaatttttagtgataacattcattatattttattttacttttttaggatttgtaattatatttatgttcagattatcatttgagcagaaaagaagatattcttttgtgatgaatgaaaaaaagattgcggaagccgctaatgctgctaaaaccatttttatagccaatgtcagtcatgatattcgtacccctattaacggaataatggcggctactgagcttttggatacaactattcttacagatgttcaaaaagattatgttaggatgataaattattcatctgattctttgctttctttaattgatgatatattgtatttgtctaaaatagatgtcaatgaattatatgttgagagtcaagagattgatttagagagtgaaatggaaatggttttaaaagcttttcaatctcaatgtgcaaagaaaaatattgatttattctcttattctaaatctatttttaataattatataaagggtgatattgtaaaaattaaacaagttttaattaatttaataggaaatgcttttaagtttacagatgatggtgttattgttttaaattatgaagaagtatgtagaacaagaactgatggtaatagggttttggttacagttgaatttaaggtaatagatacaggcaaagggattgaaaaagaaaatttttctaagatatttgaaatatttaaacaagaggatgattcttcttcaagggttcatgaaggtgcaggattgggattgtcaatatctagagagcttataagactaatgggtggtcttggtattgctgttgatagcaaggtgggagagggtacaactttttcatttatgttgccctttttattgggtagtgagcttaaaagtaaaaaattgtcaatcaatagatttcaatcagtaaatggtgacaataaagtattaaatgtgcttttaagtcaaaaatctattaaaatttttgagcactgttcgattttattgggatgctcttctaatgtgcgctatgtagcgtcttttgaggatgcttataaagtcttcaagaaatacccttcttataattttgtttatataaatgtaaataacgataatattcaagagggtattcgacttgccaataatattgaaagactaaattctgatgtacaaattatttttttattttattatttagataataaagctctaaaaaatttaaaatatggttatgttaaaaagcctttaatggggcttggtatatgctctattctttataaaaaagagtttaacccagaaatggattttgaggatttggttccaatagatagtgctttaaggataaaagagcccattaatgttttaatagctgaagataatcaggtaaatcaaaaagtgttgaaagatattcttgttgttataggcattaatgaaaattttattgatgttgtagatgatggagtaaaggctttaaaatctttaaaagataaaaaatatactatctcttttattgatatacgaatgccaagatatgatggattttcggtggctaaggaaattagaaaatttgaaaaggcaaagaatttaaagccttgtgttttggttgctgtaacagcgcatgctttgcaagagtataaagacaagtgtcttgcaagtggtatgaatgattatatctcaaaaccaatacacataagttcaattaaaactatattaaaaaaatacttacagtttgaagttgatgatattggggagaatgaaaatttgaatcaacttgttaagtttcctaatttagatgttaatagggctttaaaagaattaaatctttcatatgtatcatattctgaattatgtagagggcttgttgattttatctctattaatattattgatttggaaaaagcttttgatgaggaagatttgtctttaattaaggatatatctcattcaatatctggagctctttctaatatgcgtagcgaattgtataaagattttcaaaaaattgaaacaagtaaagattcaatttctgagttgaaaaaaatgtattcttttgtaaaagatgatttatttcaactaataagcgacataaaggaaaatattttgtttgagtctgagattgttagtgagaacaagctatattttaaaaataatgatcaatttttaaaccttctcaacaaacttttaattggtattaagactagaaagccaagagaatacaaagaaattcttgagagcattaataaatatgttttagacgataatattcaggtattatttagtgatcttcgcagaaatttaagattatatagatttgctgagagctctaagattcttgaagagattattgaaatgcttaataataagagatattat

SEQ ID NO: 416 - DNA, 4434 bp, Borrelia burgdorferi
tgctttgtcaacgtcaatttattttctaaggatattttcaagtttaagcttgtagatcaattttttcctttttactacaagaataataaaggagaatatgaaggacttattttttctattttagataaatgggcaaaagataataatgctgatattatggttgagcatattgataatttaaatgaaagtgaaattgaagacgaagcaatatatttaggattaacttataatgtaaaattaaatgattttttttattttaaaagtgagcttgctaggagtatttcaattttattttttaaaaactctaataaaaaatataaaaatacccattcaacatttttatccaattttaatataggagttattaaaaatacaatatatgaagatatcttaaggttaaaaaacgttaacaccatttttttggctgataattctcaagagttagtattggccttaaaaaacgataaagttgattatatatatggtgattgcaagactttacattatattgcaaataactttttaagtgaagatcttgtgatttttaccggggatgttttttatagtatcaaaaatagagtggctattagtagaaatgctcctgagatagtaaagaatttgaatttagatttgttttcatatttaatgaaaatgcctgaggaacttgttttttcttttttagatagcaatgctaagggaagttttgttgatgttggtttatataatgattatcctcctttaagttttattaattcacagggaaaattgtctggcattttagtggatttgtggaatcttctctcaagacaacatatctttaaacctatttttaagggattttccaaagaggatattaagaaatcattagatggaaaatcagtaggtatttttggaggaattattagcaatgatagtgtgttggaaaatgttaattatgtagtaagtaagccaatatatcctcttaattttaaattttattctaaagacctaagcaatgatgctggtccaataaattctcagtttattgattttaattttaataatattcaattaaataagaataaagatattgttaataactttatagatattgttaataattcatatgggtttatagaaaattcaataacaacaaaatatttgttaaaattaaatggatataacggtagattaaaatcttacgattcgatttttaataaaaataggtttttagtattagccattgataataggatttataaggttattaaatatattctcaattctatatttgatgatatttcatttgaatctttgcttcaaatagataaaaattggttggataaagaagagattaatagttctagaataaatagttataaaattatgaataaggttaaatttaatatagaagaaaaaatttggttatcaaaaaataataaattaaatcttgctgttaaaaattggtatccaatagattatgttgaggcaaataattataaaggaataaatcaatttttgcttgataagattagaatgttttcaggtttgagatttaacataattaaagtacacagcagtttagatcttaaaaaattaatcaaatctggaaaaatcgatatgctaaatactaatgcaaccgattcaaatttagataatgttttcaacataaaattaaattctcgaattccactttatattttttcaaataagaaaagggtgcttccatctagatctttagaaaagtttgctatacttgattttttatatagtaaaaatttggcttctaatattaaatcaaagcttattctggtaagcagttttaatgaagcgttgcttcttctttataagggaaaggtagatgggattattagcgatgagtatacagctgctgctgtttttgaggaattaaatattgatgatgttgaaaaaattcctacttttagagatttggcttttgatttgagtcttgctatttataatcaagattatatcttgaaagaaattattcaaaaagttgttatgcgttcaaatgttgacagtcagatgtatttaaatgattggaaatttgatatttattataaatccagaagtatcaggtttaaaaatttcaaatttttagtgataacattcattatattttattttacttttttaggatttgtaattatatttatgttcagattatcatttgagcagaaaagaagatattcttttgtgatgaatgaaaaaaagattgcggaagccgctaatgctgctaaaaccatttttatagccaatgtcagtcatgatattcgtacccctattaacggaataatggcggctactgagcttttggatacaactattcttacagatgttcaaaaagattatgttaggatgataaattattcatctgattctttgctttctttaattgatgatatattgtatttgtctaaaatagatgtcaatgaattatatgttgagagtcaagagattgatttagagagtgaaatggaaatggttttaaaagcttttcaatctcaatgtgcaaagaaaaatattgatttattctcttattctaaatctatttttaataattatataaagggtgatattgtaaaaattaaacaagttttaattaatttaataggaaatgcttttaagtttacagatgatggtgttattgttttaaattatgaagaagtatgtagaacaagaactgatggtaatagggttttggttacagttgaatttaaggtaatagatacaggcaaagggattgaaaaagaaaatttttctaagatatttgaaatatttaaacaagaggatgattcttcttcaagggttcatgaaggtgcaggattgggattgtcaatatctagagagcttataagactaatgggtggtcttggtattgctgttgatagcaaggtgggagagggtacaactttttcatttatgttgccctttttattgggtagtgagcttaaaagtaaaaaattgtcaatcaatagatttcaatcagtaaatggtgacaataaagtattaaatgtgcttttaagtcaaaaatctattaaaatttttgagcactgttcgattttattgggatgctcttctaatgtgcgctatgtagcgtcttttgaggatgcttataaagtcttcaagaaatacccttcttataattttgtttatataaatgtaaataacgataatattcaagagggtattcgacttgccaataatattgaaagactaaattctgatgtacaaattatttttttattttattatttagataataaagctctaaaaaatttaaaatatggttatgttaaaaagcctttaatggggcttggtatatgctctattctttataaaaaagagtttaacccagaaatggattttgaggatttggttccaatagatagtgctttaaggataaaagagcccattaatgttttaatagctgaagataatcaggtaaatcaaaaagtgttgaaagatattcttgttgttataggcattaatgaaaattttattgatgttgtagatgatggagtaaaggctttaaaatctttaaaagataaaaaatatactatctcttttattgatatacgaatgccaagatatgatggattttcggtggctaaggaaattagaaaatttgaaaaggcaaagaatttaaagccttgtgttttggttgctgtaacagcgcatgctttgcaagagtataaagacaagtgtcttgcaagtggtatgaatgattatatctcaaaaccaatacacataagttcaattaaaactatattaaaaaaatacttacagtttgaagttgatgatattggggagaatgaaaatttgaatcaacttgttaagtttcctaatttagatgttaatagggctttaaaagaattaaatctttcatatgtatcatattctgaattatgtagagggcttgttgattttatctctattaatattattgatttggaaaaagcttttgatgaggaagatttgtctttaattaaggatatatctcattcaatatctggagctctttctaatatgcgtagcgaattgtataaagattttcaaaaaattgaaacaagtaaagattcaatttctgagttgaaaaaaatgtattcttttgtaaaagatgatttatttcaactaataagcgacataaaggaaaatattttgtttgagtctgagattgttagtgagaacaagctatattttaaaaataatgatcaatttttaaaccttctcaacaaacttttaattggtattaagactagaaagccaagagaatacaaagaaattcttgagagcattaataaatatgttttagacgataatattcaggtattatttagtgatcttcgcagaaatttaagattatatagatttgctgagagctctaagattcttgaagagattattgaaatgcttaataataagagatattag

SEQ ID NO: 417 - protein, 343 aa, Borrelia burgdorferi
MNLLVKIAKFILILFLFTSCNQKQSEIQNLTHLLKSSNKNRLDKFLIIDRVVNIYIANKNYEDALEIVNNGIIDDESREYYPLYLYLMGNIYDSMGEDFVAFNIYKRVVDNFDDYVYENHSMKTRVAKKIVNLNIDSIDKINYYKFILNMGIDNLNNEEKGNYFYNLALSLEDVQDYDESYFYYKKFLSIPRAHLKIDSRDYFNVVTKINYFNNPEFVVYRNLGDLIQDVKNFVLSGNTSKLLNIRDKNNFFIQSWDQKGGKSNSINTNSFLTTMIRLGGRRKNGIQFAKHLEADSSDDISYLESRGWDHIHEWYFVFKRIVYPKDPEINNGWTWIGVYLGKK

SEQ ID NO: 418 - protein, 324 aa, Borrelia burgdorferi
CNQKQSEIQNLTHLLKSSNKNRLDKFLIIDRVVNIYIANKNYEDALEIVNNGIIDDESREYYPLYLYLMGNIYDSMGEDFVAFNIYKRVVDNFDDYVYENHSMKTRVAKKIVNLNIDSIDKINYYKFILNMGIDNLNNEEKGNYFYNLALSLEDVQDYDESYFYYKKFLSIPRAHLKIDSRDYFNVVTKINYFNNPEFVVYRNLGDLIQDVKNFVLSGNTSKLLNIRDKNNFFIQSWDQKGGKSNSINTNSFLTTMIRLGGRRKNGIQFAKHLEADSSDDISYLESRGWDHIHEWYFVFKRIVYPKDPEINNGWTWIGVYLGKK

SEQ ID NO: 419 - DNA, 1032 bp, Borrelia burgdorferi
atgaatctattggtcaaaattgctaaatttattttgattttgtttttatttacttcttgcaaccaaaagcaaagcgagattcaaaatcttacacatcttttaaaatcttctaataaaaatagattagataaatttcttattattgatagagttgttaacatatatattgcaaataaaaattatgaagatgctttagaaattgtaaataatggaattattgatgatgaatctagagaatattatcctttgtatctttatttaatgggcaatatttatgattccatgggagaagattttgtagcttttaatatttacaagcgtgttgttgataattttgatgattatgtttatgaaaaccattcaatgaaaacaagggttgctaaaaagattgtcaatttaaatattgattcaatcgataaaatcaattattacaaatttatattaaatatggggattgataatttaaataatgaggaaaagggtaattatttttataatcttgcgctaagtttggaagatgttcaagattacgatgaatcttatttttattataaaaaatttctttcaattccaagggcacatttaaaaatagattctagagactattttaatgttgttacaaaaattaattactttaataatccagagtttgttgtttatagaaatttaggagatttaatccaggatgttaaaaattttgttctttctggtaatacttctaaattgcttaatataagagataagaataatttttttattcaaagctgggatcaaaagggtggaaagagtaattccattaatactaatagctttttaaccactatgattaggcttggggggagaagaaaaaacggaatacaatttgcaaagcatcttgaggcagattctagtgacgatatatcttatcttgagtcaaggggctgggaccatattcatgaatggtattttgtttttaaaagaattgtttatcctaaagatccagaaattaataatggctggacttggataggcgtgtatttaggtaaaaaataa

SEQ ID NO: 420 - DNA, 975 bp, Borrelia burgdorferi
tgcaaccaaaagcaaagcgagattcaaaatcttacacatcttttaaaatcttctaataaaaatagattagataaatttcttattattgatagagttgttaacatatatattgcaaataaaaattatgaagatgctttagaaattgtaaataatggaattattgatgatgaatctagagaatattatcctttgtatctttatttaatgggcaatatttatgattccatgggagaagattttgtagcttttaatatttacaagcgtgttgttgataattttgatgattatgtttatgaaaaccattcaatgaaaacaagggttgctaaaaagattgtcaatttaaatattgattcaatcgataaaatcaattattacaaatttatattaaatatggggattgataatttaaataatgaggaaaagggtaattatttttataatcttgcgctaagtttggaagatgttcaagattacgatgaatcttatttttattataaaaaatttctttcaattccaagggcacatttaaaaatagattctagagactattttaatgttgttacaaaaattaattactttaataatccagagtttgttgtttatagaaatttaggagatttaatccaggatgttaaaaattttgttctttctggtaatacttctaaattgcttaatataagagataagaataatttttttattcaaagctgggatcaaaagggtggaaagagtaattccattaatactaatagctttttaaccactatgattaggcttggggggagaagaaaaaacggaatacaatttgcaaagcatcttgaggcagattctagtgacgatatatcttatcttgagtcaaggggctgggaccatattcatgaatggtattttgtttttaaaagaattgtttatcctaaagatccagaaattaataatggctggacttggataggcgtgtatttaggtaaaaaataa

SEQ ID NO: 421 - protein, 339 aa, Borrelia burgdorferi
MNKILLLILLESIVFLSCSGKGSLGSEIPKVSLIIDGTFDDKSFNESALNGVKKVKEEFKIELVLKESSSNSYLSDLEGLKDAGSDLIWLIGYRFSDVAKVAALQNPDMKYAIIDPIYSNDPIPANLVGMTFRAQEGAFLTGYIAAKLSKTGKIGFLGGIEGEIVDAFRYGYEAGAKYANKDIKISTQYIGSFADLEAGRSVATRMYSDEIDIIHHAAGLGGIGAIEVAKELGSGHYIIGVDEDQAYLAPDNVITSTTKDVGRALNIFTSNHLKTNTFEGGKLINYGLKEGVVGFVRNPKMISFELEKEIDNLSSKIINKEIIVPSNKESYEKFLKEFI

SEQ ID NO: 422 - protein, 322 aa, Borrelia burgdorferi
CSGKGSLGSEIPKVSLIIDGTFDDKSFNESALNGVKKVKEEFKIELVLKESSSNSYLSDLEGLKDAGSDLIWLIGYRFSDVAKVAALQNPDMKYAIIDPIYSNDPIPANLVGMTFRAQEGAFLTGYIAAKLSKTGKIGFLGGIEGEIVDAFRYGYEAGAKYANKDIKISTQYIGSFADLEAGRSVATRMYSDEIDIIHHAAGLGGIGAIEVAKELGSGHYIIGVDEDQAYLAPDNVITSTTKDVGRALNIFTSNHLKTNTFEGGKLINYGLKEGVVGFVRNPKMISFELEKEIDNLSSKIINKEIIVPSNKESYEKFLKEFI

SEQ ID NO: 423 - DNA, 1020 bp, Borrelia burgdorferi
atgaataaaatattgttgttgattttgcttgagagtattgtttttttatcttgtagtggtaaaggtagtcttgggagcgaaattcctaaggtatctttaataattgatggaacttttgatgataaatcttttaatgagagtgctttaaatggcgtaaaaaaagttaaagaagaatttaaaattgagcttgttttaaaagaatcctcatcaaattcttatttatctgatcttgaagggcttaaggatgcgggctcagatttaatttggcttattgggtatagatttagcgatgtggccaaggttgcggctcttcaaaatcccgatatgaaatatgcaattattgatcctatttattctaacgatcctattcctgcaaatttggtgggcatgacctttagagctcaagagggtgcatttttaacgggttatattgctgcaaaactttctaaaacaggtaaaattggatttttagggggaatagaaggcgagatagtagatgcttttaggtatgggtatgaagctggtgctaagtatgctaataaagatataaagatatctactcagtatattggtagttttgctgaccttgaagctggtagaagcgttgcaactaggatgtattctgatgagatagacattattcatcatgctgcaggccttggaggaattggggctattgaggttgcaaaagaacttggttctgggcattacattattggagttgatgaagatcaagcatatcttgctcctgacaatgtaataacatctacaactaaagatgttggtagagctttaaatatttttacatctaaccatttaaaaactaatactttcgaaggtggcaaattaataaattatggccttaaagaaggagttgtggggtttgtaagaaatcctaaaatgatttcctttgaacttgaaaaagaaattgacaatctttctagcaaaataatcaacaaagaaattattgttccatctaataaagaaagttatgagaagtttcttaaagaatttatttaa

SEQ ID NO: 424 - DNA, 969 bp, Borrelia burgdorferi
tgtagtggtaaaggtagtcttgggagcgaaattcctaaggtatctttaataattgatggaacttttgatgataaatcttttaatgagagtgctttaaatggcgtaaaaaaagttaaagaagaatttaaaattgagcttgttttaaaagaatcctcatcaaattcttatttatctgatcttgaagggcttaaggatgcgggctcagatttaatttggcttattgggtatagatttagcgatgtggccaaggttgcggctcttcaaaatcccgatatgaaatatgcaattattgatcctatttattctaacgatcctattcctgcaaatttggtgggcatgacctttagagctcaagagggtgcatttttaacgggttatattgctgcaaaactttctaaaacaggtaaaattggatttttagggggaatagaaggcgagatagtagatgcttttaggtatgggtatgaagctggtgctaagtatgctaataaagatataaagatatctactcagtatattggtagttttgctgaccttgaagctggtagaagcgttgcaactaggatgtattctgatgagatagacattattcatcatgctgcaggccttggaggaattggggctattgaggttgcaaaagaacttggttctgggcattacattattggagttgatgaagatcaagcatatcttgctcctgacaatgtaataacatctacaactaaagatgttggtagagctttaaatatttttacatctaaccatttaaaaactaatactttcgaaggtggcaaattaataaattatggccttaaagaaggagttgtggggtttgtaagaaatcctaaaatgatttcctttgaacttgaaaaagaaattgacaatctttctagcaaaataatcaacaaagaaattattgttccatctaataaagaaagttatgagaagtttcttaaagaatttatttaa

SEQ ID NO: 425 - protein, 194 aa, Borrelia burgdorferi
MYKNGFFKNYLSLFLIFLVIACTSKDSSNEYVEEQEAENSSKPDDSKIDEHTIGHVFHAMGVVHSKKDRKSLGKNIKVFYFSEEDGHFQTIPSKENAKLIVYFYDNVYAGEAPISISGKEAFIFVGITPDFKKIINSNLHGAKSDLIGTFKDLNIKNSKLEITVDENNSDAKTFLESVNYIIDGVEKISPMLTN

SEQ ID NO: 426 - protein, 173 aa, Borrelia burgdorferi
CTSKDSSNEYVEEQEAENSSKPDDSKIDEHTIGHVFHAMGVVHSKKDRKSLGKNIKVFYFSEEDGHFQTIPSKENAKLIVYFYDNVYAGEAPISISGKEAFIFVGITPDFKKIINSNLHGAKSDLIGTFKDLNIKNSKLEITVDENNSDAKTFLESVNYIIDGVEKISPMLTN

SEQ ID NO: 427 - DNA, 585 bp, Borrelia burgdorferi
atgtataaaaatggtttttttaaaaactatttgtcattgtttttaatttttttagtaattgcttgtacttcaaaagatagctcaaatgaatatgttgaggagcaagaagcggagaactcttctaagcctgatgattctaaaatagatgaacatactattgggcacgtttttcacgctatgggagtagttcattcaaaaaaggatcgaaaaagtttggggaaaaatataaaggttttttatttttctgaagaagatggacattttcaaacaataccctcaaaagagaatgcaaagttaatagtttatttttatgacaatgtttatgcaggagaggctccaattagtatctctggaaaagaagcctttatttttgttgggattacccctgactttaaaaagattataaatagcaatttacatggcgctaaaagtgatcttattggtacttttaaagatcttaatattaaaaattcaaaattggaaattacagttgatgagaataattcagatgccaagaccttccttgaatctgttaattacattatcgacggcgttgaaaaaatttcacctatgttaacgaattaa

SEQ ID NO: 428 - DNA, 522 bp, Borrelia burgdorferi
tgtacttcaaaagatagctcaaatgaatatgttgaggagcaagaagcggagaactcttctaagcctgatgattctaaaatagatgaacatactattgggcacgtttttcacgctatgggagtagttcattcaaaaaaggatcgaaaaagtttggggaaaaatataaaggttttttatttttctgaagaagatggacattttcaaacaataccctcaaaagagaatgcaaagttaatagtttatttttatgacaatgtttatgcaggagaggctccaattagtatctctggaaaagaagcctttatttttgttgggattacccctgactttaaaaagattataaatagcaatttacatggcgctaaaagtgatcttattggtacttttaaagatcttaatattaaaaattcaaaattggaaattacagttgatgagaataattcagatgccaagaccttccttgaatctgttaattacattatcgacggcgttgaaaaaatttcacctatgttaacgaattaa

SEQ ID NO: 429 - protein, 541 aa, Borrelia burgdorferi
MSFNKTKKIGKKIKIVTLLMLAVSLIACNNNSEKEKLAFKVYIGGAPSSLDPHLVDETIGARILEQIFSGLLTLNTKTGKLKPGLAKNWEASKDKKTYQFYLRDNLFWSDGVEITAEGIRKSFLRILNKETGSTNVDMLKSIIKNGQEYFDGKVSDSELGIKAIDSKTLEITLTAPKPYFLELLLHYAFMPVPIHVIEKYKGNWTSPENMVTSGPFKLKKRLPNEKIIFEKNERYYNAKEVELDELVYITSDNDLTVYNMYKNNEIDAIFNSIPPDIVNEIKLQKDYYQHKSNAIYLYSFNTKIKPLDDARVREALTLAIDRETLTYKVLNDGTVPTREITPDLKNYNYGKKLALFDPEKSKKLLADAGYPNGKGFPMLTLKYNTNETHKKIAAFIQNQWKKILNINLMLTNENWPVLTNSRNTGNFEIIRVGRIGEYLDPHTYFTIFTRENSQLASYGYSNLEFDKLIRESDLEKDPIKRKQLLRKAESIIIEKDFPAAPIYIYSGHYLFRNDKWTGWNPNVSEVYYLSELKPIKNAKHN

SEQ ID NO: 430 - protein, 514 aa, Borrelia burgdorferi
CNNNSEKEKLAFKVYIGGAPSSLDPHLVDETIGARILEQIFSGLLTLNTKTGKLKPGLAKNWEASKDKKTYQFYLRDNLFWSDGVEITAEGIRKSFLRILNKETGSTNVDMLKSIIKNGQEYFDGKVSDSELGIKAIDSKTLEITLTAPKPYFLELLLHYAFMPVPIHVIEKYKGNWTSPENMVTSGPFKLKKRLPNEKIIFEKNERYYNAKEVELDELVYITSDNDLTVYNMYKNNEIDAIFNSIPPDIVNEIKLQKDYYQHKSNAIYLYSFNTKIKPLDDARVREALTLAIDRETLTYKVLNDGTVPTREITPDLKNYNYGKKLALFDPEKSKKLLADAGYPNGKGFPMLTLKYNTNETHKKIAAFIQNQWKKILNINLMLTNENWPVLTNSRNTGNFEIIRVGRIGEYLDPHTYFTIFTRENSQLASYGYSNLEFDKLIRESDLEKDPIKRKQLLRKAESIIIEKDFPAAPIYIYSGHYLFRNDKWTGWNPNVSEVYYLSELKPIKNAKHN

SEQ ID NO: 431 - DNA, 1626 bp, Borrelia burgdorferi
atgagctttaataaaactaaaaaaatcggtaaaaaaattaaaatagtaacactacttatgcttgctgtgtctttaattgcatgcaataataattcagaaaaagaaaaattagcatttaaagtatacatagggggagcgccctcatcgcttgaccctcatttggtagatgagacaataggagcaagaattttagaacaaatattctcagggcttttgacattaaataccaaaacaggaaagctaaagcccggacttgctaaaaattgggaagcctcaaaagataaaaaaacatatcaattttatctaagggacaaccttttttggagcgatggagttgaaattaccgctgaagggataagaaaatcttttttaagaattttaaataaagaaacaggatctacaaatgttgacatgctcaaatcaataataaaaaatggacaagagtattttgacgggaaagtatccgattctgaacttggaatcaaggcaattgatagtaaaacgctggaaataacacttacggccccaaagccatattttcttgaactgcttctacattacgcattcatgccagtacctattcatgtgattgaaaaatataagggaaattggacaagccctgaaaacatggttactagcggtccttttaaattaaaaaaaagattacctaatgaaaaaattatctttgaaaaaaacgaacgttattataatgcaaaagaagtagaacttgatgagcttgtctacattacgtctgacaatgatcttactgtgtacaatatgtacaaaaacaacgaaattgatgctatttttaacagcatcccgccggacattgtaaatgaaataaaactacaaaaagactattaccaacacaaaagtaatgcaatttatttatattcatttaatacaaaaataaaaccccttgatgatgctagagttagagaagctttaaccttagctattgacagagaaactttaacttacaaagtgctaaatgatggcacagttcctacaagagaaataactcctgatcttaaaaattacaattacggtaaaaaattggctttatttgatcctgaaaaatctaaaaagcttttggcagatgcagggtatcctaatgggaaaggattcccaatgctaacactaaaatataatacaaacgaaactcataaaaaaattgctgcatttattcaaaaccaatggaaaaaaattctaaatatcaatcttatgcttaccaacgaaaattggcctgttcttaccaacagcagaaatactggcaattttgaaataataagagttggacgcattggggaatatttagatccacacacatactttactatattcacaagagaaaattcacaacttgcatcatacggatattcaaacctagaatttgacaaactcatcagagaatcagatcttgaaaaagatcctataaaaagaaaacaattactcagaaaagcagaatcaataataattgaaaaagattttcctgctgcaccaatatacatatattctgggcattatctttttagaaacgataaatggactggatggaatcctaatgtatcagaggtttattatctttctgaattaaaaccaattaaaaatgcaaaacataattaa

SEQ ID NO: 432 - DNA, 1545 bp, Borrelia burgdorferi
tgcaataataattcagaaaaagaaaaattagcatttaaagtatacatagggggagcgccctcatcgcttgaccctcatttggtagatgagacaataggagcaagaattttagaacaaatattctcagggcttttgacattaaataccaaaacaggaaagctaaagcccggacttgctaaaaattgggaagcctcaaaagataaaaaaacatatcaattttatctaagggacaaccttttttggagcgatggagttgaaattaccgctgaagggataagaaaatcttttttaagaattttaaataaagaaacaggatctacaaatgttgacatgctcaaatcaataataaaaaatggacaagagtattttgacgggaaagtatccgattctgaacttggaatcaaggcaattgatagtaaaacgctggaaataacacttacggccccaaagccatattttcttgaactgcttctacattacgcattcatgccagtacctattcatgtgattgaaaaatataagggaaattggacaagccctgaaaacatggttactagcggtccttttaaattaaaaaaaagattacctaatgaaaaaattatctttgaaaaaaacgaacgttattataatgcaaaagaagtagaacttgatgagcttgtctacattacgtctgacaatgatcttactgtgtacaatatgtacaaaaacaacgaaattgatgctatttttaacagcatcccgccggacattgtaaatgaaataaaactacaaaaagactattaccaacacaaaagtaatgcaatttatttatattcatttaatacaaaaataaaaccccttgatgatgctagagttagagaagctttaaccttagctattgacagagaaactttaacttacaaagtgctaaatgatggcacagttcctacaagagaaataactcctgatcttaaaaattacaattacggtaaaaaattggctttatttgatcctgaaaaatctaaaaagcttttggcagatgcagggtatcctaatgggaaaggattcccaatgctaacactaaaatataatacaaacgaaactcataaaaaaattgctgcatttattcaaaaccaatggaaaaaaattctaaatatcaatcttatgcttaccaacgaaaattggcctgttcttaccaacagcagaaatactggcaattttgaaataataagagttggacgcattggggaatatttagatccacacacatactttactatattcacaagagaaaattcacaacttgcatcatacggatattcaaacctagaatttgacaaactcatcagagaatcagatcttgaaaaagatcctataaaaagaaaacaattactcagaaaagcagaatcaataataattgaaaaagattttcctgctgcaccaatatacatatattctgggcattatctttttagaaacgataaatggactggatggaatcctaatgtatcagaggtttattatctttctgaattaaaaccaattaaaaatgcaaaacataattaa

SEQ ID NO: 433 - protein, 279 aa, Borrelia burgdorferi
MKKVIILIFMLSTSLLYNCKNQDNEKIVSIGGSTTVSPILDEMILRYNKINNNTKVTYDAQGSSVGINGLFNKIYKIAISSRDLTKEEIEQGAKETVFAYDALIFITSPEIKITNITEENLAKILNGEIQNWKQVGGPDAKINFINRDSSSGSYSSIKDLLLNKIFKTHEEAQFRQDGIVVKSNGEVIEKTSLTPHSIGYIGLGYAKNSIEKGLNILSVNSTYPTKETINSNKYTIKRNLIIVTNNKYEDKSVTQFIDFMTSSTGQDIVEEQGFLGIKT

SEQ ID NO: 434 - protein, 261 aa, Borrelia burgdorferi
CKNQDNEKIVSIGGSTTVSPILDEMILRYNKINNNTKVTYDAQGSSVGINGLFNKIYKIAISSRDLTKEEIEQGAKETVFAYDALIFITSPEIKITNITEENLAKILNGEIQNWKQVGGPDAKINFINRDSSSGSYSSIKDLLLNKIFKTHEEAQFRQDGIVVKSNGEVIEKTSLTPHSIGYIGLGYAKNSIEKGLNILSVNSTYPTKETINSNKYTIKRNLIIVTNNKYEDKSVTQFIDFMTSSTGQDIVEEQGFLGIKT

SEQ ID NO: 435 - DNA, 840 bp, Borrelia burgdorferi
atgaaaaaagttattatcttaatttttatgctatcaacaagtttattatacaactgtaaaaatcaagacaatgaaaaaattgtatcaattggaggatctacaactgtaagcccaatactagacgaaatgattttaagatataataaaataaacaataatactaaagtaacatacgatgcacaaggaagtagtgttggcataaacgggctatttaacaaaatatataaaatagcaatatcatcaagagatttaacaaaagaagaaattgaacaaggggcaaaagaaactgtatttgcttatgatgctttaattttcattacaagccctgaaataaaaattacaaatattacagaagaaaatctagctaaaatactaaatggagaaattcaaaattggaaacaagtgggaggtcctgatgctaaaatcaactttatcaatcgagactcttcttctggttcttattcgtctataaaagacctacttcttaataaaatattcaaaactcacgaagaagctcaatttagacaagacggaatagtggtaaaatctaatggagaggtaattgaaaaaacaagccttactccccactcaataggatatataggtcttggatacgcaaaaaattcaatagaaaagggtttgaatattctttctgttaacagcacatatcctacaaaagaaacaataaatagcaataaatacaccattaaaagaaatttaataatagttacaaataacaaatacgaggataaaagcgtaactcaatttattgatttcatgacaagctcaactggacaagatattgttgaagaacaaggctttttagggataaaaacataa

SEQ ID NO: 436 - DNA, 786 bp, Borrelia burgdorferi
tgtaaaaatcaagacaatgaaaaaattgtatcaattggaggatctacaactgtaagcccaatactagacgaaatgattttaagatataataaaataaacaataatactaaagtaacatacgatgcacaaggaagtagtgttggcataaacgggctatttaacaaaatatataaaatagcaatatcatcaagagatttaacaaaagaagaaattgaacaaggggcaaaagaaactgtatttgcttatgatgctttaattttcattacaagccctgaaataaaaattacaaatattacagaagaaaatctagctaaaatactaaatggagaaattcaaaattggaaacaagtgggaggtcctgatgctaaaatcaactttatcaatcgagactcttcttctggttcttattcgtctataaaagacctacttcttaataaaatattcaaaactcacgaagaagctcaatttagacaagacggaatagtggtaaaatctaatggagaggtaattgaaaaaacaagccttactccccactcaataggatatataggtcttggatacgcaaaaaattcaatagaaaagggtttgaatattctttctgttaacagcacatatcctacaaaagaaacaataaatagcaataaatacaccattaaaagaaatttaataatagttacaaataacaaatacgaggataaaagcgtaactcaatttattgatttcatgacaagctcaactggacaagatattgttgaagaacaaggctttttagggataaaaacataa

SEQ ID NO: 437 - protein, 508 aa, Borrelia burgdorferi
MNKKLNEVLLKLDQDLIKCVKGSLDLEISGVTYSSKLVLPRFVFFALPGIHFDGHDFIEIAIQKGSNVVVCSRDVDFYSPNVTYIKVDDFNIRKFMSNFSNIFYDEPSKKLKVIGVTGTDGKSSVCYYIYLLFKKKGVKVGFISTVFFDDGSGSLIKNPYRQSTPESTEIHSFLSTMVKNEAQYAILESTSHGLDLETARLIDVNYFAVVFTNIGHEHLEFHGTIQNYLNVKLGLFRSVSDDAGFGVINLDDLYSSDFKNAVKKSFTYSLKSSKADFFVSFIDEKTDSTRFEFYHKGVKYLANVSLLGSFNVENVMAALILVSQILNIDIQDIVDKLNCIKSLDGRMDSINLGQNFSVIIDYAHTPGAFSKLFPIFKRFATNRLISVFGSAGERDVEKRFLQGQIADIYSDLIILCDEDPRGENSMCIIKDIAKGIVNKVENKDLFFIADRKQAIEKAISLAKAGDLVVALGKGHESSIIYKNREVFWNEQEVVKNAILSLEKSEKEK

SEQ ID NO: 438 - protein, 490 aa, Borrelia burgdorferi
CVKGSLDLEISGVTYSSKLVLPRFVFFALPGIHFDGHDFIEIAIQKGSNVVVCSRDVDFYSPNVTYIKVDDFNIRKFMSNFSNIFYDEPSKKLKVIGVTGTDGKSSVCYYIYLLFKKKGVKVGFISTVFFDDGSGSLIKNPYRQSTPESTEIHSFLSTMVKNEAQYAILESTSHGLDLETARLIDVNYFAVVFTNIGHEHLEFHGTIQNYLNVKLGLFRSVSDDAGFGVINLDDLYSSDFKNAVKKSFTYSLKSSKADFFVSFIDEKTDSTRFEFYHKGVKYLANVSLLGSFNVENVMAALILVSQILNIDIQDIVDKLNCIKSLDGRMDSINLGQNFSVIIDYAHTPGAFSKLFPIFKRFATNRLISVFGSAGERDVEKRFLQGQIADIYSDLIILCDEDPRGENSMCIIKDIAKGIVNKVENKDLFFIADRKQAIEKAISLAKAGDLVVALGKGHESSIIYKNREVFWNEQEVVKNAILSLEKSEKEK

SEQ ID NO: 439 - DNA, 1527 bp, Borrelia burgdorferi
atgaataaaaaacttaatgaagttttattaaagttagatcaagatttaataaaatgtgtaaaaggttctcttgatttagaaatatcaggagttacttatagttctaaattggttttgcccaggtttgtgttttttgctcttccaggaattcattttgatgggcatgattttattgaaattgcaattcaaaagggtagtaatgttgttgtgtgttcacgagatgtggatttttacagtcctaatgttacttatattaaggtagatgactttaacataagaaaatttatgtctaatttttcaaatattttttatgatgagccttcaaaaaaattaaaagttattggagtcactggcactgacgggaaaagttctgtttgttattatatatatcttctttttaaaaaaaagggtgttaaagtaggttttatatcgacagtattttttgatgatgggagtggaagcttgattaaaaatccttacagacaatcaactcccgagtctacggaaatacattcatttttaagcaccatggttaaaaatgaagctcaatatgcaattcttgaatctacttctcatgggcttgaccttgaaacagcaaggcttattgatgttaattattttgcagttgtttttaccaatattggacatgagcatcttgaatttcatggcacaattcaaaattatttgaatgtcaagctgggtctttttcggtctgttagtgatgatgctggttttggggttattaatcttgatgacctttattcttctgattttaagaatgctgttaagaaatcttttacttatagcttaaaaagcagtaaagcggatttttttgttagttttattgatgagaaaaccgattctactagatttgaattttatcacaagggggttaaatatcttgctaatgttagcctactggggagttttaatgttgagaatgtaatggctgctcttattttagtttctcaaattttaaatatcgatattcaagatattgttgataaacttaactgcattaaaagtcttgatgggcgtatggatagtattaatttggggcaaaatttttctgtaataattgattatgctcatactcctggtgctttttccaagctttttcctatttttaaaagatttgctaccaatagattgatttctgtttttggctctgcaggagaaagagatgttgaaaaaagatttttgcaagggcaaatcgcagatatttattctgatttaataatactttgcgatgaagatccaagaggcgagaatagtatgtgtataattaaagacattgcaaaaggaattgtaaataaagttgaaaataaggatttattttttattgctgatagaaagcaggctattgaaaaagcaataagtcttgcaaaagcaggagatttggttgttgctttgggcaaaggtcatgaaagttcaataatttataaaaatagagaagttttttggaatgaacaagaggtagttaaaaatgctattttaagtttagaaaaatcagaaaaggagaagtga

SEQ ID NO: 440 - DNA, 1473 bp, Borrelia burgdorferi
tgtgtaaaaggttctcttgatttagaaatatcaggagttacttatagttctaaattggttttgcccaggtttgtgttttttgctcttccaggaattcattttgatgggcatgattttattgaaattgcaattcaaaagggtagtaatgttgttgtgtgttcacgagatgtggatttttacagtcctaatgttacttatattaaggtagatgactttaacataagaaaatttatgtctaatttttcaaatattttttatgatgagccttcaaaaaaattaaaagttattggagtcactggcactgacgggaaaagttctgtttgttattatatatatcttctttttaaaaaaaagggtgttaaagtaggttttatatcgacagtattttttgatgatgggagtggaagcttgattaaaaatccttacagacaatcaactcccgagtctacggaaatacattcatttttaagcaccatggttaaaaatgaagctcaatatgcaattcttgaatctacttctcatgggcttgaccttgaaacagcaaggcttattgatgttaattattttgcagttgtttttaccaatattggacatgagcatcttgaatttcatggcacaattcaaaattatttgaatgtcaagctgggtctttttcggtctgttagtgatgatgctggttttggggttattaatcttgatgacctttattcttctgattttaagaatgctgttaagaaatcttttacttatagcttaaaaagcagtaaagcggatttttttgttagttttattgatgagaaaaccgattctactagatttgaattttatcacaagggggttaaatatcttgctaatgttagcctactggggagttttaatgttgagaatgtaatggctgctcttattttagtttctcaaattttaaatatcgatattcaagatattgttgataaacttaactgcattaaaagtcttgatgggcgtatggatagtattaatttggggcaaaatttttctgtaataattgattatgctcatactcctggtgctttttccaagctttttcctatttttaaaagatttgctaccaatagattgatttctgtttttggctctgcaggagaaagagatgttgaaaaaagatttttgcaagggcaaatcgcagatatttattctgatttaataatactttgcgatgaagatccaagaggcgagaatagtatgtgtataattaaagacattgcaaaaggaattgtaaataaagttgaaaataaggatttattttttattgctgatagaaagcaggctattgaaaaagcaataagtcttgcaaaagcaggagatttggttgttgctttgggcaaaggtcatgaaagttcaataatttataaaaatagagaagttttttggaatgaacaagaggtagttaaaaatgctattttaagtttagaaaaatcagaaaaggagaagtga

SEQ ID NO: 441 - protein, 238 aa, Borrelia burgdorferi
MVFRTYKHLELIMLPMLMLSCAFFKKPQSVHQDSNTGKPISDEKLHLISGKISNKKLPIINSNHDVTWIKTKAMTILGEDGKEIPEFKNKFGYSYIISPVKMDGKYSYYASLLILFETTKNGDDEYEIEDVKFVTAGSTLELKNSLLAVENSQEEGYVTAYPFGILMSDEIKNAFKLTYKNGHWNYMLADLTVKNKLTQETKIYKISLNSKLIIEFLKEVLKENSILKDIAGDLFEDI

SEQ ID NO: 442 - protein, 218 aa, Borrelia burgdorferi
CAFFKKPQSVHQDSNTGKPISDEKLHLISGKISNKKLPIINSNHDVTWIKTKAMTILGEDGKEIPEFKNKFGYSYIISPVKMDGKYSYYASLLILFETTKNGDDEYEIEDVKFVTAGSTLELKNSLLAVENSQEEGYVTAYPFGILMSDEIKNAFKLTYKNGHWNYMLADLTVKNKLTQETKIYKISLNSKLIIEFLKEVLKENSILKDIAGDLFEDI

SEQ ID NO: 443 - DNA, 717 bp, Borrelia burgdorferi
atggtatttagaacatataaacatttggaactaataatgctgcccatgttaatgctgagttgcgctttttttaagaaaccacaatctgtacatcaagacagcaatactggcaaaccaataagcgatgaaaaattacatttaatatcaggcaaaatttcaaataaaaaattgccaatcataaatagtaatcatgacgtaacttggataaaaacaaaggcaatgacaatcttaggcgaagatggaaaagaaataccagaatttaaaaacaaatttggatattcttatataatatctcctgtaaaaatggatggaaaatatagttattacgcgtcattattaatactttttgaaacaactaaaaatggagatgatgaatatgaaattgaagatgttaaatttgtaacagctggttccaccctagaacttaaaaattctcttttagctgttgaaaattcacaagaagaaggatatgttactgcatacccatttggaatattgatgagtgacgagattaaaaatgcttttaaattaacatataaaaatggtcattggaattatatgcttgcagatttaactgtcaaaaataaacttactcaagaaactaaaatttataaaatttctcttaattcaaaattaattattgaatttttaaaagaagtgctaaaagaaaattctatattaaaagacatagctggagatttatttgaagatatataa

SEQ ID NO: 444 - DNA, 657 bp, Borrelia burgdorferi
tgcgctttttttaagaaaccacaatctgtacatcaagacagcaatactggcaaaccaataagcgatgaaaaattacatttaatatcaggcaaaatttcaaataaaaaattgccaatcataaatagtaatcatgacgtaacttggataaaaacaaaggcaatgacaatcttaggcgaagatggaaaagaaataccagaatttaaaaacaaatttggatattcttatataatatctcctgtaaaaatggatggaaaatatagttattacgcgtcattattaatactttttgaaacaactaaaaatggagatgatgaatatgaaattgaagatgttaaatttgtaacagctggttccaccctagaacttaaaaattctcttttagctgttgaaaattcacaagaagaaggatatgttactgcatacccatttggaatattgatgagtgacgagattaaaaatgcttttaaattaacatataaaaatggtcattggaattatatgcttgcagatttaactgtcaaaaataaacttactcaagaaactaaaatttataaaatttctcttaattcaaaattaattattgaatttttaaaagaagtgctaaaagaaaattctatattaaaagacatagctggagatttatttgaagatatataa

SEQ ID NO: 445 - protein, 126 aa, Borrelia burgdorferi
MLRKLKDISKIVLVTDGLTPNCQTCGKLIANGDEVYIAEDGLFHSVKSNTIAGSTLTMIQGLKNLIEFGFSLSDAVQASSYNPTRILNIDKKGLICHGYDANLNVLDKDFNLKLTMIESKIIFNNL

SEQ ID NO: 446 - protein, 105 aa, Borrelia burgdorferi
CQTCGKLIANGDEVYIAEDGLFHSVKSNTIAGSTLTMIQGLKNLIEFGFSLSDAVQASSYNPTRILNIDKKGLICHGYDANLNVLDKDFNLKLTMIESKIIFNNL

SEQ ID NO: 447 - DNA, 381 bp, Borrelia burgdorferi
atgcttagaaagcttaaagatataagtaaaatagtccttgtaactgacggacttactccgaattgtcaaacttgtggaaaactaattgcaaacggagacgaagtttatattgcagaagatggattattccatagcgtgaaaagcaacacaatagctggatcaacactcacaatgatacaaggtcttaaaaatttaatagaatttggtttcagcttaagcgatgctgttcaagcaagctcttacaatccaacaagaattctcaatattgataaaaagggcttaatatgtcatggatatgatgcaaacctcaatgtcctagataaagattttaatctaaagttaacaatgatagaatctaaaataatttttaacaatctctaa

SEQ ID NO: 448 - DNA, 318 bp, Borrelia burgdorferi
tgtcaaacttgtggaaaactaattgcaaacggagacgaagtttatattgcagaagatggattattccatagcgtgaaaagcaacacaatagctggatcaacactcacaatgatacaaggtcttaaaaatttaatagaatttggtttcagcttaagcgatgctgttcaagcaagctcttacaatccaacaagaattctcaatattgataaaaagggcttaatatgtcatggatatgatgcaaacctcaatgtcctagataaagattttaatctaaagttaacaatgatagaatctaaaataatttttaacaatctctaa

SEQ ID NO: 449 - protein, 230 aa, Borrelia burgdorferi
MKILWLIILVNLFLSCGNESKEKSNLGLRLRELEISGGGSESKIEVYKEFIEKEDKNILKIVNSIDKKARFFNLIGLEFFKLGQYGPAIEYFAKNLEINPNNYLSHFYIGVASYNLAKNLRVKDEVEKYIILAENSFLKSLSIRDDFKDSLFAISNMYVYDLDKQLEAKNYLNKLGDMGEDYFEFLMLRGANYYSLGDLGNAILFYDKASKKASTEEQKEGVSRIMSNLK

SEQ ID NO: 450 - protein, 215 aa, Borrelia burgdorferi
CGNESKEKSNLGLRLRELEISGGGSESKIEVYKEFIEKEDKNILKIVNSIDKKARFFNLIGLEFFKLGQYGPAIEYFAKNLEINPNNYLSHFYIGVASYNLAKNLRVKDEVEKYIILAENSFLKSLSIRDDFKDSLFAISNMYVYDLDKQLEAKNYLNKLGDMGEDYFEFLMLRGANYYSLGDLGNAILFYDKASKKASTEEQKEGVSRIMSNLK

SEQ ID NO: 451 - DNA, 693 bp, Borrelia burgdorferi
atgaaaattttgtggttaataattcttgttaatttatttttatcttgtggcaatgaatctaaagaaaaatcaaatcttggtcttagattaagagaattggaaatttcaggtggtggatctgaatctaagattgaagtttataaagaatttattgaaaaagaagataagaatattttaaagatagttaattccattgataagaaagccagattttttaatttaattggtcttgaattttttaagcttggtcagtacggacctgctattgaatattttgctaaaaatttagaaatcaatcccaataattatttatctcatttttatataggtgttgcttcttataatttagctaaaaatttaagagtaaaagatgaagttgaaaaatacataattcttgctgaaaattcttttttaaaatcactttcaattagagatgattttaaagattctctttttgccatttctaatatgtacgtatatgatcttgataaacaacttgaagctaaaaattatttaaataaacttggtgatatgggtgaggactattttgagtttttaatgttaagaggtgcaaattattattcgctgggcgatcttggtaatgctatattgttttatgataaagctagtaaaaaggcttcaactgaagagcaaaaagaaggtgtttctaggatcatgagtaatttgaagtaa

SEQ ID NO: 452 - DNA, 648 bp, Borrelia burgdorferi
tgtggcaatgaatctaaagaaaaatcaaatcttggtcttagattaagagaattggaaatttcaggtggtggatctgaatctaagattgaagtttataaagaatttattgaaaaagaagataagaatattttaaagatagttaattccattgataagaaagccagattttttaatttaattggtcttgaattttttaagcttggtcagtacggacctgctattgaatattttgctaaaaatttagaaatcaatcccaataattatttatctcatttttatataggtgttgcttcttataatttagctaaaaatttaagagtaaaagatgaagttgaaaaatacataattcttgctgaaaattcttttttaaaatcactttcaattagagatgattttaaagattctctttttgccatttctaatatgtacgtatatgatcttgataaacaacttgaagctaaaaattatttaaataaacttggtgatatgggtgaggactattttgagtttttaatgttaagaggtgcaaattattattcgctgggcgatcttggtaatgctatattgttttatgataaagctagtaaaaaggcttcaactgaagagcaaaaagaaggtgtttctaggatcatgagtaatttgaagtaa

SEQ ID NO: 453 - protein, 265 aa, Borrelia burgdorferi
MNNCLIKFFIFLLVFSNSYVAFSKNVNVLIVTAMDSEFDQINKLMSNKEEIVLKEYGLNKKILKGKLSNRNVMVIICGVGKVNAGVWTSYILSKYNISHVINSGVAGGVVSAKYKDIKVGDVVVSSEVAYHDVDLTKFGYKVGQLTGGLPQKFNANKNLIKNAIEAIKSKVGGSNAYSGLIVSGDQFIDPTYINKIIGNFKDVIAVEMEGAAIGHVSHMFNIPFIVIRSISDIVNKEGNEVEYSKFSKIAAFNSAKVVQEILRKL

SEQ ID NO: 454 - protein, 242 aa, Borrelia burgdorferi
KNVNVLIVTAMDSEFDQINKLMSNKEEIVLKEYGLNKKILKGKLSNRNVMVIICGVGKVNAGVWTSYILSKYNISHVINSGVAGGVVSAKYKDIKVGDVVVSSEVAYHDVDLTKFGYKVGQLTGGLPQKFNANKNLIKNAIEAIKSKVGGSNAYSGLIVSGDQFIDPTYINKIIGNFKDVIAVEMEGAAIGHVSHMFNIPFIVIRSISDIVNKEGNEVEYSKFSKIAAFNSAKVVQEILRKL

SEQ ID NO: 455 - DNA, 798 bp, Borrelia burgdorferi
atgaataattgtttaataaagttttttatttttttattagttttttcaaacagttatgttgctttttctaaaaatgtcaatgttttaatagtaactgctatggactctgagtttgatcagataaataagcttatgtctaataaggaagaaatagttcttaaggagtatggtcttaataaaaagattttaaaggggaagttgtctaatcgcaatgttatggttattatttgtggggttggtaaggttaatgctggtgtgtggactagctacattttgtcaaaatacaacataagtcatgtcattaattctggcgttgctggtggcgttgttagtgctaaatacaaagatattaaagtgggagatgtggtggtgtcttcagaggttgcatatcatgatgttgatttgactaaatttggatacaaggtaggacagcttacaggaggattgcctcaaaaatttaatgccaataaaaatttaattaagaatgccatagaggccattaaatcaaaggttggaggttctaatgcatattcaggattaatagtttcaggagatcagtttattgatccaacttatattaacaaaattataggaaactttaaagatgtaatagctgttgagatggaaggtgcagcaatagggcatgtttctcatatgtttaatataccttttatagttattaggtcaatatctgacattgtaaataaagaagggaatgaggttgaatatagtaaattttctaaaatagctgctttcaattcagccaaagttgtacaagaaattttaagaaaactttaa

SEQ ID NO: 456 - DNA, 729 bp, Borrelia burgdorferi
aaaaatgtcaatgttttaatagtaactgctatggactctgagtttgatcagataaataagcttatgtctaataaggaagaaatagttcttaaggagtatggtcttaataaaaagattttaaaggggaagttgtctaatcgcaatgttatggttattatttgtggggttggtaaggttaatgctggtgtgtggactagctacattttgtcaaaatacaacataagtcatgtcattaattctggcgttgctggtggcgttgttagtgctaaatacaaagatattaaagtgggagatgtggtggtgtcttcagaggttgcatatcatgatgttgatttgactaaatttggatacaaggtaggacagcttacaggaggattgcctcaaaaatttaatgccaataaaaatttaattaagaatgccatagaggccattaaatcaaaggttggaggttctaatgcatattcaggattaatagtttcaggagatcagtttattgatccaacttatattaacaaaattataggaaactttaaagatgtaatagctgttgagatggaaggtgcagcaatagggcatgtttctcatatgtttaatataccttttatagttattaggtcaatatctgacattgtaaataaagaagggaatgaggttgaatatagtaaattttctaaaatagctgctttcaattcagccaaagttgtacaagaaattttaagaaaactttaa

SEQ ID NO: 457 - protein, 123 aa, Borrelia burgdorferi
MNTKTLYLISLILLACNKNNKIPLIQKLDLPKSSILGFSNKMGIIIKDYAFLSKSTKKNSELDYDYAILLRKDEVVKIEKTLEKTERYGIEGNWILVNYKGTKRYIFSKDINIVNNLIIDHSK

SEQ ID NO: 458 - protein, 108 aa, Borrelia burgdorferi
CNKNNKIPLIQKLDLPKSSILGFSNKMGIIIKDYAFLSKSTKKNSELDYDYAILLRKDEVVKIEKTLEKTERYGIEGNWILVNYKGTKRYIFSKDINIVNNLIIDHSK

SEQ ID NO: 459 - DNA, 372 bp, Borrelia burgdorferi
atgaatacaaaaacattatatttaatatccttaattcttttagcttgcaataaaaataacaaaattcctctcattcaaaaattagatttgcccaaaagcagcattcttggctttagcaataaaatgggcataataataaaagattatgcttttcttagtaaaagcactaagaaaaatagcgaattggattatgattacgcaattctactcagaaaagacgaagtcgtaaaaattgaaaaaacactagaaaaaacagagcgctatggaattgaaggaaattggatcctagtcaattacaagggaactaaaagatacatctttagcaaagacatcaatatagtcaacaatttaataattgatcattctaaatag

SEQ ID NO: 460 - DNA, 327 bp, Borrelia burgdorferi
tgcaataaaaataacaaaattcctctcattcaaaaattagatttgcccaaaagcagcattcttggctttagcaataaaatgggcataataataaaagattatgcttttcttagtaaaagcactaagaaaaatagcgaattggattatgattacgcaattctactcagaaaagacgaagtcgtaaaaattgaaaaaacactagaaaaaacagagcgctatggaattgaaggaaattggatcctagtcaattacaagggaactaaaagatacatctttagcaaagacatcaatatagtcaacaatttaataattgatcattctaaatag

SEQ ID NO: 461 - protein, 262 aa, Borrelia burgdorferi
MKSIYALLFLFINLSLLANNISKKDLEVLLKIAQAMNKECKNFIEKNPIQFLKEIKPLVDAEKNNLLTLINKKIPIPENYKIPDLVNIDDFEDLKNLGAKTIKVRKILIEDLIRLIKDAKKFGIEIKIKSAYRTQEYQKFLFDYNVKTYGRKVAETQSAIPGHSQHHMGTAIDFINIDDNLLNTKEGKWLYENSLKYGFSVSYPKGYETDTGYKAEPWHYLYIGPKPCFIQKKYFNNLQHKLLEFWNQNKTNLINLIEKYAN

SEQ ID NO: 462 - protein, 244 aa, Borrelia burgdorferi
NNISKKDLEVLLKIAQAMNKECKNFIEKNPIQFLKEIKPLVDAEKNNLLTLINKKIPIPENYKIPDLVNIDDFEDLKNLGAKTIKVRKILIEDLIRLIKDAKKFGIEIKIKSAYRTQEYQKFLFDYNVKTYGRKVAETQSAIPGHSQHHMGTAIDFINIDDNLLNTKEGKWLYENSLKYGFSVSYPKGYETDTGYKAEPWHYLYIGPKPCFIQKKYFNNLQHKLLEFWNQNKTNLINLIEKYAN

SEQ ID NO: 463 - DNA, 789 bp, Borrelia burgdorferi
atgaaatcaatttatgctttattatttctatttattaatttatctttgttggctaacaacatttcaaaaaaagatttagaagtactgctaaagattgcccaagcaatgaataaggaatgcaaaaattttattgaaaaaaatcctattcagttcttaaaagaaataaaacccttagtagatgcagaaaaaaataacctcttaactctaataaataaaaaaataccaattcctgaaaattataaaatacctgatctggtaaatattgatgattttgaagatcttaaaaatcttggagcaaagactattaaagtaagaaaaatattaatcgaagatttaattcgactaataaaagatgcaaaaaaatttgggattgaaattaaaatcaaatctgcttacagaacgcaagaatatcaaaaatttttatttgattacaatgtcaaaacttatggcagaaaagttgcagaaacccaatcagcaattccaggccattctcaacatcatatgggaacagcaatagattttataaatatagatgataatttactaaacacaaaagaaggaaaatggctttatgaaaactctctaaaatacggattttccgtttcatacccaaaaggatatgaaacggacactggatataaagcagagccttggcactacttatacataggacctaagccatgctttattcagaaaaaatattttaataatttacaacataagcttcttgaattttggaaccagaacaaaacaaatcttattaacctaattgaaaaatatgcaaactaa

SEQ ID NO: 464 - DNA, 735 bp, Borrelia burgdorferi
aacaacatttcaaaaaaagatttagaagtactgctaaagattgcccaagcaatgaataaggaatgcaaaaattttattgaaaaaaatcctattcagttcttaaaagaaataaaacccttagtagatgcagaaaaaaataacctcttaactctaataaataaaaaaataccaattcctgaaaattataaaatacctgatctggtaaatattgatgattttgaagatcttaaaaatcttggagcaaagactattaaagtaagaaaaatattaatcgaagatttaattcgactaataaaagatgcaaaaaaatttgggattgaaattaaaatcaaatctgcttacagaacgcaagaatatcaaaaatttttatttgattacaatgtcaaaacttatggcagaaaagttgcagaaacccaatcagcaattccaggccattctcaacatcatatgggaacagcaatagattttataaatatagatgataatttactaaacacaaaagaaggaaaatggctttatgaaaactctctaaaatacggattttccgtttcatacccaaaaggatatgaaacggacactggatataaagcagagccttggcactacttatacataggacctaagccatgctttattcagaaaaaatattttaataatttacaacataagcttcttgaattttggaaccagaacaaaacaaatcttattaacctaattgaaaaatatgcaaactaa

SEQ ID NO: 465 - protein, 181 aa, Borrelia burgdorferi
MLYLGDNKAMRTKIIIMTIIILLAPISGFSNSKESARGKFGAGIILPLPIALQINIGNFDLDIGLYSGVNNLFSDWKTLFIALDYIFYIYTFPGAANILDFSVGAGGYGTIWFSRFGGSKSGSGPMSIGARLPLALNIAVFRKKFDIFLRIAPGLGMNVWSNGVGFRWEVFAGLGLRFWFT

SEQ ID NO: 466 - protein, 159 aa, Borrelia burgdorferi
LAPISGFSNSKESARGKFGAGIILPLPIALQINIGNFDLDIGLYSGVNNLFSDWKTLFIALDYIFYIYTFPGAANILDFSVGAGGYGTIWFSRFGGSKSGSGPMSIGARLPLALNIAVFRKKFDIFLRIAPGLGMNVWSNGVGFRWEVFAGLGLRFWFT

SEQ ID NO: 467 - DNA, 546 bp, Borrelia burgdorferi
atgctatacttaggagataataaagcaatgagaacaaaaataattattatgacaattattattttattagccccaatctcaggattttctaattcaaaagaatctgcaaggggtaaatttggagcaggaattatacttccattaccaattgctctacagattaatataggaaactttgatcttgacattggtctttacagcggagtaaataatttgttttcagactggaaaacattatttatagcattagactatattttctacatatacacattcccgggagctgctaatattttggatttttcagttggcgcagggggatatggaacaatatggttttcaagatttggaggcagtaagtcaggctcaggaccaatgagcattggagcaagattgcctttggccttaaatattgcagtatttaggaagaaattcgacatatttttacgaatagcacccggacttggaatgaatgtttggagtaatggcgttggatttagatgggaagtattcgcaggattgggactaagattctggtttacttaa

SEQ ID NO: 468 - DNA, 480 bp, Borrelia burgdorferi
ttagccccaatctcaggattttctaattcaaaagaatctgcaaggggtaaatttggagcaggaattatacttccattaccaattgctctacagattaatataggaaactttgatcttgacattggtctttacagcggagtaaataatttgttttcagactggaaaacattatttatagcattagactatattttctacatatacacattcccgggagctgctaatattttggatttttcagttggcgcagggggatatggaacaatatggttttcaagatttggaggcagtaagtcaggctcaggaccaatgagcattggagcaagattgcctttggccttaaatattgcagtatttaggaagaaattcgacatatttttacgaatagcacccggacttggaatgaatgtttggagtaatggcgttggatttagatgggaagtattcgcaggattgggactaagattctggtttacttaa

SEQ ID NO: 469 - protein, 209 aa, Borrelia burgdorferi
MNKTKNRSLTYFIILSCISLFGANNNTISYSSIEIPLEDLSEEFKSSGNKSDQINTSKHLNKNIVSYEDPKKGKDLKLPENIRDKKLPQKRMDENDLKSVIENYENKIKNIEKLLKTKNQKTSENENKKIESIEKKAKKYEILTNKLKNEIVEIKKLLNKKIKPKEDENYEKINIENIEEETDDDFEDNYEYNDEIEEQMRTITLLMKE

SEQ ID NO: 470 - protein, 193 aa, Borrelia burgdorferi
CISLFGANNNTISYSSIEIPLEDLSEEFKSSGNKSDQINTSKHLNKNIVSYEDPKKGKDLKLPENIRDKKLPQKRMDENDLKSVIENYENKIKNIEKLLKTKNQKTSENENKKIESIEKKAKKYEILTNKLKNEIVEIKKLLNKKIKPKEDENYEKINIENIEEETDDDFEDNYEYNDEIEEQMRTITLLMKE

SEQ ID NO: 471 - DNA, 630 bp, Borrelia burgdorferi
atgaataaaacaaaaaatcgaagccttacgtattttataatactttcatgtatatcattatttggggctaataataatacaataagctactctagcattgaaattcctctagaagacttaagtgaagaatttaaaagttctgggaataaaagcgatcaaataaatacctcaaaacatttaaacaaaaacatagtttcttatgaagacccaaaaaagggtaaagatctaaaattgccagaaaatataagagacaaaaaactaccccaaaaaagaatggacgaaaatgatctaaaatctgtaattgaaaattatgaaaataaaattaaaaacatagaaaagcttttaaaaaccaaaaatcaaaaaacatcggaaaatgaaaataaaaaaatagaatcaatcgaaaaaaaagcaaaaaaatatgaaattttaaccaataaattaaaaaacgaaatagtagaaataaaaaagctccttaacaaaaaaatcaagcctaaagaagatgaaaattacgaaaaaataaatattgaaaacattgaagaagaaactgatgatgattttgaagacaattatgaatataatgatgaaattgaagaacaaatgaggacaattacccttctaatgaaggaataa

SEQ ID NO: 472 - DNA, 582 bp, Borrelia burgdorferi
tgtatatcattatttggggctaataataatacaataagctactctagcattgaaattcctctagaagacttaagtgaagaatttaaaagttctgggaataaaagcgatcaaataaatacctcaaaacatttaaacaaaaacatagtttcttatgaagacccaaaaaagggtaaagatctaaaattgccagaaaatataagagacaaaaaactaccccaaaaaagaatggacgaaaatgatctaaaatctgtaattgaaaattatgaaaataaaattaaaaacatagaaaagcttttaaaaaccaaaaatcaaaaaacatcggaaaatgaaaataaaaaaatagaatcaatcgaaaaaaaagcaaaaaaatatgaaattttaaccaataaattaaaaaacgaaatagtagaaataaaaaagctccttaacaaaaaaatcaagcctaaagaagatgaaaattacgaaaaaataaatattgaaaacattgaagaagaaactgatgatgattttgaagacaattatgaatataatgatgaaattgaagaacaaatgaggacaattacccttctaatgaaggaataa

SEQ ID NO: 473 - protein, 552 aa, Borrelia burgdorferi
MQIDGKIYSIISFPVRDSVSTLGVIGILICFDESLDIIENQLYSSLKFGSKNYNFFMLDRNYMPIFSNLNNLQAKSFSTAYSENFLSKVIAYAKKDSSSSQYTFNYERDFYSLNFVKTDDFLTQGLILNVNSIPIMFKSNWVIFVAFLLLSFAIIFYLCNTFVFSLINDFNRIVDYQKSKSDPFSLESPLEVKYSSSIISYISSKLDNLSSKSNESFEKIKFYSEDLNEYLEQIETAISNTESIDSSILVYEQLRDTFSRFEKSIVDILKGFESIADPINDHNKYISEISSNFEESVSFFYSIDKNLEIFNKVATINSTDIENIKSKVFDLNIVFENVNKNFADLLSQTNSLQSVNKLLVSISAQTNMLAMNAAIEAAKAGDAGKSFAVVAEEIRKLAINSGKYSKTIKDELKTVDSIIAVINSEIDTIYKNFIDIQDNVDNNFSRHEKVDLTLAKHFKEIGEFKERYLSHDTKIRDAKNMYKEIFNNHYFISGKFNNFSQDLKEFKVSKMNLDAVSSLQEYSSLVKSSKDKILKTKELIQKINDEIKDILF

SEQ ID NO: 474 - protein, 523 aa, Borrelia burgdorferi
CFDESLDIIENQLYSSLKFGSKNYNFFMLDRNYMPIFSNLNNLQAKSFSTAYSENFLSKVIAYAKKDSSSSQYTFNYERDFYSLNFVKTDDFLTQGLILNVNSIPIMFKSNWVIFVAFLLLSFAIIFYLCNTFVFSLINDFNRIVDYQKSKSDPFSLESPLEVKYSSSIISYISSKLDNLSSKSNESFEKIKFYSEDLNEYLEQIETAISNTESIDSSILVYEQLRDTFSRFEKSIVDILKGFESIADPINDHNKYISEISSNFEESVSFFYSIDKNLEIFNKVATINSTDIENIKSKVFDLNIVFENVNKNFADLLSQTNSLQSVNKLLVSISAQTNMLAMNAAIEAAKAGDAGKSFAVVAEEIRKLAINSGKYSKTIKDELKTVDSIIAVINSEIDTIYKNFIDIQDNVDNNFSRHEKVDLTLAKHFKEIGEFKERYLSHDTKIRDAKNMYKEIFNNHYFISGKFNNFSQDLKEFKVSKMNLDAVSSLQEYSSLVKSSKDKILKTKELIQKINDEIKDILF

SEQ ID NO: 475 - DNA, 1659 bp, Borrelia burgdorferi
atgcaaatagatgggaaaatttattctataataagttttccagttagagattctgtttcaacattgggtgtgatagggattttaatatgctttgatgagtcgttagatattattgaaaatcagttgtattcttctcttaaatttggtagtaaaaattataatttttttatgcttgacagaaattacatgcccattttttcaaaccttaataatcttcaggccaaatctttttctacagcttatagtgagaattttttgagtaaagttatagcttatgctaaaaaagattcttctagctctcagtacacttttaattatgaaagagatttttattctttaaactttgtaaaaaccgatgattttttgactcaggggcttattttaaatgtcaattccattcctattatgtttaaatcaaattgggttatatttgttgcatttttattattgtcttttgcaattattttttatttatgcaatacttttgttttttcattaattaatgattttaacagaattgttgactatcaaaaatcaaaaagcgatccttttagtcttgaatctcccttagaggttaagtattcttcatctattatttcttatattagttcaaagctagataatctgtcttctaagagtaatgaatcttttgagaagataaaattttattctgaagatttgaatgaatatttggaacaaatagaaactgctatatcaaatactgagagtatagattctagcattttagtttacgaacaactaagagatactttttctagatttgaaaaatcaattgttgatattttaaaaggctttgaatctattgctgatccgattaatgatcacaataaatatatatcagaaatctcttcaaattttgaagagagtgttagttttttctatagtatagataaaaatttagaaatttttaataaggttgctactataaattctactgatattgaaaatattaaaagtaaggtttttgatttaaatattgtttttgaaaatgtgaataaaaattttgcagatcttttgtctcaaacaaatagtttgcaaagtgtaaataaacttttagtttcaatttcagctcagaccaatatgcttgctatgaatgcagcaattgaagcagcaaaagcaggtgatgcaggtaaaagttttgcagttgttgctgaggagattagaaagcttgctattaattctggaaaatattctaaaaccattaaagatgaacttaaaacggtcgacagcattattgcagtaattaattcagagattgatacaatttataaaaatttcatagacattcaagataatgtggacaacaatttttcaagacacgagaaagtagatcttactcttgctaagcattttaaagaaattggcgagtttaaagaaaggtatttgtctcacgatactaagatcagagatgctaagaatatgtataaagaaatatttaataatcattattttattagtggcaagtttaacaactttagtcaagatttaaaagagtttaaagtttctaagatgaatttagatgcggtaagttctcttcaagaatattcatctttagtaaagtcttctaaggataagatattaaagacaaaggaattgattcaaaagattaatgatgagattaaagatattcttttttag

SEQ ID NO: 476 - DNA, 1572 bp, Borrelia burgdorferi
tgctttgatgagtcgttagatattattgaaaatcagttgtattcttctcttaaatttggtagtaaaaattataatttttttatgcttgacagaaattacatgcccattttttcaaaccttaataatcttcaggccaaatctttttctacagcttatagtgagaattttttgagtaaagttatagcttatgctaaaaaagattcttctagctctcagtacacttttaattatgaaagagatttttattctttaaactttgtaaaaaccgatgattttttgactcaggggcttattttaaatgtcaattccattcctattatgtttaaatcaaattgggttatatttgttgcatttttattattgtcttttgcaattattttttatttatgcaatacttttgttttttcattaattaatgattttaacagaattgttgactatcaaaaatcaaaaagcgatccttttagtcttgaatctcccttagaggttaagtattcttcatctattatttcttatattagttcaaagctagataatctgtcttctaagagtaatgaatcttttgagaagataaaattttattctgaagatttgaatgaatatttggaacaaatagaaactgctatatcaaatactgagagtatagattctagcattttagtttacgaacaactaagagatactttttctagatttgaaaaatcaattgttgatattttaaaaggctttgaatctattgctgatccgattaatgatcacaataaatatatatcagaaatctcttcaaattttgaagagagtgttagttttttctatagtatagataaaaatttagaaatttttaataaggttgctactataaattctactgatattgaaaatattaaaagtaaggtttttgatttaaatattgtttttgaaaatgtgaataaaaattttgcagatcttttgtctcaaacaaatagtttgcaaagtgtaaataaacttttagtttcaatttcagctcagaccaatatgcttgctatgaatgcagcaattgaagcagcaaaagcaggtgatgcaggtaaaagttttgcagttgttgctgaggagattagaaagcttgctattaattctggaaaatattctaaaaccattaaagatgaacttaaaacggtcgacagcattattgcagtaattaattcagagattgatacaatttataaaaatttcatagacattcaagataatgtggacaacaatttttcaagacacgagaaagtagatcttactcttgctaagcattttaaagaaattggcgagtttaaagaaaggtatttgtctcacgatactaagatcagagatgctaagaatatgtataaagaaatatttaataatcattattttattagtggcaagtttaacaactttagtcaagatttaaaagagtttaaagtttctaagatgaatttagatgcggtaagttctcttcaagaatattcatctttagtaaagtcttctaaggataagatattaaagacaaaggaattgattcaaaagattaatgatgagattaaagatattcttttttag

SEQ ID NO: 477 - protein, 166 aa, Borrelia burgdorferi
MSIDKVPDEAFAEKIVGDGIAILPTSNELLAPCDGKIGKIFKTNHAFSLETKEGVEIFVHFGINTLNLNGKGFTRVAEEGINVKQGEVIIRLDLEYLKEHSESVITPVVIANSDEVSSIEYSFGRLENDSEYILSSSTVLTEEIRHKISQTKPVIAGKDLVLRVKK

SEQ ID NO: 478 - protein, 134 aa, Borrelia burgdorferi
CDGKIGKIFKTNHAFSLETKEGVEIFVHFGINTLNLNGKGFTRVAEEGINVKQGEVIIRLDLEYLKEHSESVITPVVIANSDEVSSIEYSFGRLENDSEYILSSSTVLTEEIRHKISQTKPVIAGKDLVLRVKK

SEQ ID NO: 479 - DNA, 501 bp, Borrelia burgdorferi
atgtcaattgataaggttcccgatgaagcttttgctgaaaaaatagttggcgatggaattgcaattcttccaacaagcaatgagttgttggcgccttgtgatgggaaaataggtaaaatttttaaaaccaatcatgcctttagccttgaaactaaagagggcgttgaaatttttgtccattttggaattaatactcttaatttaaatggtaagggttttacaagagttgctgaagagggcattaatgttaaacaaggtgaagttattattaggcttgatcttgaatatttaaaagagcattcagaatccgttattactccggttgttattgcaaattctgatgaagtttcaagtatagaatattcttttggaaggcttgaaaatgattctgaatatattttatcatcttcaactgtcttgacagaagaaattaggcataaaatatctcaaacaaagcctgttatagcgggcaaagatttggtgttgcgagttaaaaagtaa

SEQ ID NO: 480 - DNA, 405 bp, Borrelia burgdorferi
tgtgatgggaaaataggtaaaatttttaaaaccaatcatgcctttagccttgaaactaaagagggcgttgaaatttttgtccattttggaattaatactcttaatttaaatggtaagggttttacaagagttgctgaagagggcattaatgttaaacaaggtgaagttattattaggcttgatcttgaatatttaaaagagcattcagaatccgttattactccggttgttattgcaaattctgatgaagtttcaagtatagaatattcttttggaaggcttgaaaatgattctgaatatattttatcatcttcaactgtcttgacagaagaaattaggcataaaatatctcaaacaaagcctgttatagcgggcaaagatttggtgttgcgagttaaaaagtaa

SEQ ID NO: 481 - protein, 718 aa, Borrelia burgdorferi
MNYQRIKNYCKFTSVFLFFLFSCVSNELKLDQSLVKGKLVNGLRYYIYKNQTPKNAVNMGIVFNVGSLNEEDNERGIAHYLEHMAFNGTKDYPGNSIVDVLKKFGMQFGADINAATSFDFTYYRLDLSDGNNKDEIDESINILRNWASQISFMKEEIDLERNIIIEEKKLGETYPGRIYEKMDKFLTSGSLYEFRSPIGLEEQILSFQPEDFKKFYRKWYRPELASVIVVGDIDPIEIEEKIKKQFVSWKNPTDKIKEVKVSLDVELKDKFLLLEDLEVGEPSLMFFKKEIINFVKTKDDLLNAIKKSLLAALFENRFSELKTAGVKQFKNVSNKDFFSFKSDNNTIVAKSISLNFNPDHLNEGIQDFFYELERIRKFGFTQGELEKVRSQFYKSLELRKKNINKTNSWAIFQDLIEIAINGSNKFDMNEYCDLSFQYLEKIDLKTINNLVGREFDVKNCAIFYSYHGRAHPVLTLEDIDNLQKIALKRELKPYENSLIEGKFFKKSLDDKDIIRENEFENEISSFVLENGVEVYFKYNDQKKGVIDFSATSWGGLINEDLKLIPVLSFAPGVVSGSGYGDYSALQIEKYLSDKAVSLRVGVGAQESYISGSSDKKDLETLFQLIYFTFKEPKIDDVSLQNAINNIKALIKSNENSSDYHFHKAISKFLNNNDPRFEDTKDSDLQYFTKENILSFYKKRFTYANNFKFVLLETQIFRQ

SEQ ID NO: 482 - protein, 696 aa, Borrelia burgdorferi
CVSNELKLDQSLVKGKLVNGLRYYIYKNQTPKNAVNMGIVFNVGSLNEEDNERGIAHYLEHMAFNGTKDYPGNSIVDVLKKFGMQFGADINAATSFDFTYYRLDLSDGNNKDEIDESINILRNWASQISFMKEEIDLERNIIIEEKKLGETYPGRIYEKMDKFLTSGSLYEFRSPIGLEEQILSFQPEDFKKFYRKWYRPELASVIVVGDIDPIEIEEKIKKQFVSWKNPTDKIKEVKVSLDVELKDKFLLLEDLEVGEPSLMFFKKEIINFVKTKDDLLNAIKKSLLAALFENRFSELKTAGVKQFKNVSNKDFFSFKSDNNTIVAKSISLNFNPDHLNEGIQDFFYELERIRKFGFTQGELEKVRSQFYKSLELRKKNINKTNSWAIFQDLIEIAINGSNKFDMNEYCDLSFQYLEKIDLKTINNLVGREFDVKNCAIFYSYHGRAHPVLTLEDIDNLQKIALKRELKPYENSLIEGKFFKKSLDDKDIIRENEFENEISSFVLENGVEVYFKYNDQKKGVIDFSATSWGGLINEDLKLIPVLSFAPGVVSGSGYGDYSALQIEKYLSDKAVSLRVGVGAQESYISGSSDKKDLETLFQLIYFTFKEPKIDDVSLQNAINNIKALIKSNENSSDYHFHKAISKFLNNNDPRFEDTKDSDLQYFTKENILSFYKKRFTYANNFKFVLLETQIFRQ

SEQ ID NO: 483 - DNA, 2157 bp, Borrelia burgdorferi
atgaattatcaaagaattaagaattattgtaaatttacaagcgtttttctattttttttgttttcctgtgtttctaatgagttaaagttagatcaaagtttggtaaaaggaaaacttgtcaatgggctaaggtattatatttataaaaatcaaaccccaaagaatgccgttaatatgggaattgtttttaatgtgggctcacttaatgaagaagataatgagaggggaatagcgcattatcttgaacatatggcttttaatggtacaaaagattatccagggaattctatagttgatgttcttaaaaaatttggaatgcaatttggtgctgacattaatgctgctactagttttgatttcacttattatagacttgatttgtcagatggtaataataaagatgaaattgatgaatctataaatattttgagaaactgggcttctcaaatcagtttcatgaaagaagaaatagatctagagcgaaatattattattgaggaaaaaaagcttggtgagacttatcctggaagaatttatgagaaaatggataagtttttgacaagcggaagtctttatgaatttagaagtcctattggacttgaagagcaaattttatcttttcagccagaagattttaaaaaattttatagaaagtggtataggccagaacttgcaagtgttattgtggtaggagatattgatcctatagaaattgaagagaagataaagaagcaatttgtttcttggaaaaatccaaccgataaaattaaagaagtaaaagtaagtttagacgtagagcttaaggataaatttttacttttagaagatttggaagttggagagcctagtttaatgttctttaaaaaggaaattattaactttgtaaagaccaaagatgaccttttaaatgctattaaaaagtctttattagccgctctttttgaaaatagattttctgaattaaagactgctggggtaaagcaatttaaaaatgtttcaaataaagattttttctcatttaaatcagataacaataccattgttgcaaaatcgatttctttaaactttaatccagatcatttgaacgaaggaatacaagactttttttatgagcttgagaggataagaaaatttggatttacccaaggtgagcttgaaaaagttagatctcaattttacaaatctttagaattaaggaaaaagaatataaataaaacaaattcatgggctatttttcaggatttaatagaaattgctattaatggttctaataaatttgatatgaatgaatattgcgatctttcttttcaatatttggaaaagattgatttaaaaacaataaacaatcttgtaggaagagagtttgatgtaaaaaattgtgcaattttttattcttaccatggaagagcacatcctgttttaactcttgaagatattgacaatcttcaaaagatagctttaaaaagagagttaaagccttatgagaattctttaattgaaggtaaattttttaagaagtctttagatgataaagatattattagagaaaatgagtttgaaaatgaaatttcgtcatttgttcttgaaaatggggttgaagtttattttaaatataatgatcaaaaaaaaggtgtaattgattttagtgcaacttcttggggaggtttaattaatgaagatttaaaacttattcctgttttatcttttgctcccggagtagtatctggttcgggttatggtgattattctgcattacagattgaaaaatatttatcagataaagctgtttctttaagagttggggttggagctcaagaatcatatatttctggaagttcagataaaaaagatcttgaaactctttttcagcttatatattttacttttaaggaacccaaaattgatgatgtttctttgcaaaatgctattaataatataaaagcattaataaagagcaatgaaaatagttctgattatcattttcataaagccattagtaaatttttaaacaataatgatcctagatttgaagatacaaaagatagtgatttgcaatattttacaaaagaaaatattttgtctttttataagaaaaggtttacttatgcaaataattttaagtttgtcttgctggagactcagatattcagacaataa

SEQ ID NO: 484 - DNA, 2091 bp, Borrelia burgdorferi
tgtgtttctaatgagttaaagttagatcaaagtttggtaaaaggaaaacttgtcaatgggctaaggtattatatttataaaaatcaaaccccaaagaatgccgttaatatgggaattgtttttaatgtgggctcacttaatgaagaagataatgagaggggaatagcgcattatcttgaacatatggcttttaatggtacaaaagattatccagggaattctatagttgatgttcttaaaaaatttggaatgcaatttggtgctgacattaatgctgctactagttttgatttcacttattatagacttgatttgtcagatggtaataataaagatgaaattgatgaatctataaatattttgagaaactgggcttctcaaatcagtttcatgaaagaagaaatagatctagagcgaaatattattattgaggaaaaaaagcttggtgagacttatcctggaagaatttatgagaaaatggataagtttttgacaagcggaagtctttatgaatttagaagtcctattggacttgaagagcaaattttatcttttcagccagaagattttaaaaaattttatagaaagtggtataggccagaacttgcaagtgttattgtggtaggagatattgatcctatagaaattgaagagaagataaagaagcaatttgtttcttggaaaaatccaaccgataaaattaaagaagtaaaagtaagtttagacgtagagcttaaggataaatttttacttttagaagatttggaagttggagagcctagtttaatgttctttaaaaaggaaattattaactttgtaaagaccaaagatgaccttttaaatgctattaaaaagtctttattagccgctctttttgaaaatagattttctgaattaaagactgctggggtaaagcaatttaaaaatgtttcaaataaagattttttctcatttaaatcagataacaataccattgttgcaaaatcgatttctttaaactttaatccagatcatttgaacgaaggaatacaagactttttttatgagcttgagaggataagaaaatttggatttacccaaggtgagcttgaaaaagttagatctcaattttacaaatctttagaattaaggaaaaagaatataaataaaacaaattcatgggctatttttcaggatttaatagaaattgctattaatggttctaataaatttgatatgaatgaatattgcgatctttcttttcaatatttggaaaagattgatttaaaaacaataaacaatcttgtaggaagagagtttgatgtaaaaaattgtgcaattttttattcttaccatggaagagcacatcctgttttaactcttgaagatattgacaatcttcaaaagatagctttaaaaagagagttaaagccttatgagaattctttaattgaaggtaaattttttaagaagtctttagatgataaagatattattagagaaaatgagtttgaaaatgaaatttcgtcatttgttcttgaaaatggggttgaagtttattttaaatataatgatcaaaaaaaaggtgtaattgattttagtgcaacttcttggggaggtttaattaatgaagatttaaaacttattcctgttttatcttttgctcccggagtagtatctggttcgggttatggtgattattctgcattacagattgaaaaatatttatcagataaagctgtttctttaagagttggggttggagctcaagaatcatatatttctggaagttcagataaaaaagatcttgaaactctttttcagcttatatattttacttttaaggaacccaaaattgatgatgtttctttgcaaaatgctattaataatataaaagcattaataaagagcaatgaaaatagttctgattatcattttcataaagccattagtaaatttttaaacaataatgatcctagatttgaagatacaaaagatagtgatttgcaatattttacaaaagaaaatattttgtctttttataagaaaaggtttacttatgcaaataattttaagtttgtcttgctggagactcagatattcagacaataa

SEQ ID NO: 485 - protein, 284 aa, Borrelia burgdorferi
MDWDFEKIIFLLNESTRLALSGCAKLILDFKSDGSIVTQVDKQIEQFLFKEIKKPGNFVLGEETISTYKEEYIKDALISESTFIIDPIDGTSSFAAGLPSYGISLAYASGGKIIEGAISLPLSGEFFITSKDNVFYAKKNIGSYPLKKDFNKFIFDNSKCYNIHSLLAVSRSIIRLFNLDISSHIHINGSCVYSFAKLFTGSYKAYFSFVGLWDIAACLAIGNKLGMVGEFYCGNKMTLDILDSMYILEPNNHKRWSLKDFFIYSDNKSTIDIIRKDANKKINK

SEQ ID NO: 486 - protein, 262 aa, Borrelia burgdorferi
CAKLILDFKSDGSIVTQVDKQIEQFLFKEIKKPGNFVLGEETISTYKEEYIKDALISESTFIIDPIDGTSSFAAGLPSYGISLAYASGGKIIEGAISLPLSGEFFITSKDNVFYAKKNIGSYPLKKDFNKFIFDNSKCYNIHSLLAVSRSIIRLFNLDISSHIHINGSCVYSFAKLFTGSYKAYFSFVGLWDIAACLAIGNKLGMVGEFYCGNKMTLDILDSMYILEPNNHKRWSLKDFFIYSDNKSTIDIIRKDANKKINK

SEQ ID NO: 487 - DNA, 855 bp, Borrelia burgdorferi
atggattgggattttgaaaaaattatatttttattaaatgaatcaactaggcttgcattaagtggttgtgctaaattaattttagattttaaatctgatgggtctattgtaactcaggttgataagcaaattgagcaattcttattcaaagagatcaaaaagcctggaaattttgttcttggagaagagacaatatctacttataaagaagagtatatcaaagatgctttaatatcagagagtacttttattattgatcctattgatggaacttcttcttttgcagcaggccttccttcatatggaatatcgctagcgtatgctagtggcggcaaaattattgaaggagccatttctcttcctttaagcggagagttttttattacttctaaagataatgtattttatgctaaaaaaaacattggtagctatcctttaaaaaaggattttaataaatttatttttgataattctaaatgttacaatattcatagtttacttgcagtttcaaggtctattataaggttatttaatcttgatatttcttctcatattcatattaatggttcttgtgtatattcttttgctaaactttttacaggttcttataaggcctacttttcttttgtaggactttgggatattgcagcgtgtttagctattggtaataaattgggcatggttggcgaattttattgtggtaataaaatgacattagatatcttagattcaatgtatattttagagcctaataatcataaaagatggtccttgaaagatttttttatttattctgataataaatcaacaatagacattataagaaaagatgcaaataaaaaaatcaataagtaa

SEQ ID NO: 488 - DNA, 795 bp, Borrelia burgdorferi
agtggttgtgctaaattaattttagattttaaatctgatgggtctattgtaactcaggttgataagcaaattgagcaattcttattcaaagagatcaaaaagcctggaaattttgttcttggagaagagacaatatctacttataaagaagagtatatcaaagatgctttaatatcagagagtacttttattattgatcctattgatggaacttcttcttttgcagcaggccttccttcatatggaatatcgctagcgtatgctagtggcggcaaaattattgaaggagccatttctcttcctttaagcggagagttttttattacttctaaagataatgtattttatgctaaaaaaaacattggtagctatcctttaaaaaaggattttaataaatttatttttgataattctaaatgttacaatattcatagtttacttgcagtttcaaggtctattataaggttatttaatcttgatatttcttctcatattcatattaatggttcttgtgtatattcttttgctaaactttttacaggttcttataaggcctacttttcttttgtaggactttgggatattgcagcgtgtttagctattggtaataaattgggcatggttggcgaattttattgtggtaataaaatgacattagatatcttagattcaatgtatattttagagcctaataatcataaaagatggtccttgaaagatttttttatttattctgataataaatcaacaatagacattataagaaaagatgcaaataaaaaaatcaataagtaa

SEQ ID NO: 489 - protein, 213 aa, Borrelia burgdorferi
MAFYKLNDNIALAEDLLKYLLSSILNECSQDMDFLENYIEKGLIKKLENVINSNFEVITYTKAIEILENSKKNFEIKPYWGIDLQTDHERYLTEETFKKPVVVIDYPKNFKAFYMKANKDNKTVKGMDILVPKIGEIIGGSEREDDLQKLENRIKELNLNIEHLNWYLDLRRFGSAPHSGFGLGLERLVQYSTGISNIRDSIPFPRTPKNLYF

SEQ ID NO: 490 - protein, 186 aa, Borrelia burgdorferi
CSQDMDFLENYIEKGLIKKLENVINSNFEVITYTKAIEILENSKKNFEIKPYWGIDLQTDHERYLTEETFKKPVVVIDYPKNFKAFYMKANKDNKTVKGMDILVPKIGEIIGGSEREDDLQKLENRIKELNLNIEHLNWYLDLRRFGSAPHSGFGLGLERLVQYSTGISNIRDSIPFPRTPKNLYF

SEQ ID NO: 491 - DNA, 642 bp, Borrelia burgdorferi
atggctttttataagcttaacgacaatattgccctagcagaagatctcttgaaatatcttttaagttcaattttaaacgaatgctcacaagatatggattttttagaaaattacattgaaaaaggtttaattaaaaaactagaaaatgtaataaattcaaattttgaggttattacctatactaaagcaattgaaattcttgaaaactcaaaaaaaaattttgaaataaaaccttactggggaatagatttgcaaacagatcacgaaagatacctaacagaagagacttttaaaaaaccggtagtggtcattgattatccaaaaaatttcaaagcattttacatgaaagcaaataaagacaataaaactgttaaaggaatggacatacttgttccaaaaattggagagattatagggggaagcgaaagagaagatgaccttcaaaaattagaaaatagaataaaagaattaaacttaaacattgaacatctaaactggtatcttgatctaagaagatttggctcggctcctcattctggctttggacttggacttgaaagattggtgcaatactcaacaggaatatctaatataagagattcaataccattcccaaggactcctaaaaatctttatttttaa

SEQ ID NO: 492 - DNA, 561 bp, Borrelia burgdorferi
tgctcacaagatatggattttttagaaaattacattgaaaaaggtttaattaaaaaactagaaaatgtaataaattcaaattttgaggttattacctatactaaagcaattgaaattcttgaaaactcaaaaaaaaattttgaaataaaaccttactggggaatagatttgcaaacagatcacgaaagatacctaacagaagagacttttaaaaaaccggtagtggtcattgattatccaaaaaatttcaaagcattttacatgaaagcaaataaagacaataaaactgttaaaggaatggacatacttgttccaaaaattggagagattatagggggaagcgaaagagaagatgaccttcaaaaattagaaaatagaataaaagaattaaacttaaacattgaacatctaaactggtatcttgatctaagaagatttggctcggctcctcattctggctttggacttggacttgaaagattggtgcaatactcaacaggaatatctaatataagagattcaataccattcccaaggactcctaaaaatctttatttttaa

SEQ ID NO: 493 - protein, 175 aa, Borrelia burgdorferi
MKILRLCLLFLFFACTFDYDEYSSRSDVAKKFPSIQILGIKYYDVVYNKEQTVLNSLSFSYFNDYKIYKAENGRFLYHSLDNEISGKFNNLEGSYITKDLDMRDSVEFKIEDKNNYYLLNSNRLLWKNKDKKLQSPPNELVLIRFNDSKINGKGFSYFLKSNVFYFDSGVEGIMN

SEQ ID NO: 494 - protein, 161 aa, Borrelia burgdorferi
CTFDYDEYSSRSDVAKKFPSIQILGIKYYDVVYNKEQTVLNSLSFSYFNDYKIYKAENGRFLYHSLDNEISGKFNNLEGSYITKDLDMRDSVEFKIEDKNNYYLLNSNRLLWKNKDKKLQSPPNELVLIRFNDSKINGKGFSYFLKSNVFYFDSGVEGIMN

SEQ ID NO: 495 - DNA, 528 bp, Borrelia burgdorferi
atgaaaatacttagactttgtttgttgtttttgttttttgcttgtacttttgattatgatgagtattctagtagatctgatgtggccaaaaagtttccttcaatacaaatattaggaatcaagtattatgatgttgtatacaataaagagcaaaccgttttaaattctttaagctttagttatttcaatgactataaaatttataaggcagagaatggaaggtttttatatcattccctagataatgaaatttcagggaagtttaataatttggaaggttcttatattacaaaggatttggatatgagagattctgtagaatttaaaatagaagataaaaataattattatttgcttaattcaaataggcttttatggaagaataaagacaagaagttgcaatcccccccaaatgagctagtattaattagatttaatgatagcaaaataaacggaaaaggattttcttattttttaaagagcaatgttttttattttgattctggagttgaaggaatcatgaattga

SEQ ID NO: 496 - DNA, 486 bp, Borrelia burgdorferi
tgtacttttgattatgatgagtattctagtagatctgatgtggccaaaaagtttccttcaatacaaatattaggaatcaagtattatgatgttgtatacaataaagagcaaaccgttttaaattctttaagctttagttatttcaatgactataaaatttataaggcagagaatggaaggtttttatatcattccctagataatgaaatttcagggaagtttaataatttggaaggttcttatattacaaaggatttggatatgagagattctgtagaatttaaaatagaagataaaaataattattatttgcttaattcaaataggcttttatggaagaataaagacaagaagttgcaatcccccccaaatgagctagtattaattagatttaatgatagcaaaataaacggaaaaggattttcttattttttaaagagcaatgttttttattttgattctggagttgaaggaatcatgaattga

SEQ ID NO: 497 - protein, 201 aa, Borrelia burgdorferi
MKQKLSWILLFCFLSCRSESRLAENVLIEFFDSIKNFQSSPEIFFNYLNIPSDDDLKAKIRGLKSQAKDDFIFYPLFFNNLRYEIIGRKNISKGFEFEVVIKNINFQNGIEKFLAKLNKIEGRSLNIKNLEKKERKKIFDNLINEVIGELDDFDYTEVVHFFRVVKSSSESYKIELLGDVLNIQSRNKLINDLFLVLSPGI

SEQ ID NO: 498 - protein, 190 aa, Borrelia burgdorferi
CFLSCRSESRLAENVLIEFFDSIKNFQSSPEIFFNYLNIPSDDDLKAKIRGLKSQAKDDFIFYPLFFNNLRYEIIGRKNISKGFEFEVVIKNINFQNGIEKFLAKLNKIEGRSLNIKNLEKKERKKIFDNLINEVIGELDDFDYTEVVHFFRVVKSSSESYKIELLGDVLNIQSRNKLINDLFLVLSPGI

SEQ ID NO: 499 - DNA, 606 bp, Borrelia burgdorferi
atgaagcaaaaattaagttggattttattattttgttttttgtcttgtagatctgaatctagattggctgaaaatgttttaatagagttttttgattctattaaaaattttcaaagcagtcctgaaatattttttaattatttaaatattccaagtgatgatgatctgaaggcaaaaattcgtgggttgaaatctcaggcaaaggatgatttcattttttatcctttgttttttaataatctaagatatgagataataggtagaaaaaatatttctaagggctttgaatttgaagttgttattaaaaatattaactttcaaaacggtatagaaaaatttttggctaaattaaataaaattgaagggagatctttaaatattaaaaatttagaaaaaaaagagcgtaaaaaaatatttgacaatttaataaatgaagttattggagagttggatgattttgattacactgaagttgttcatttttttagagtagttaagagttcttctgaaagttataaaatagagcttttaggagatgttttaaatatacagtctagaaataagcttattaatgatctttttttggttttatcgcctggaatttaa

SEQ ID NO: 500 - DNA, 573 bp, Borrelia burgdorferi
tgttttttgtcttgtagatctgaatctagattggctgaaaatgttttaatagagttttttgattctattaaaaattttcaaagcagtcctgaaatattttttaattatttaaatattccaagtgatgatgatctgaaggcaaaaattcgtgggttgaaatctcaggcaaaggatgatttcattttttatcctttgttttttaataatctaagatatgagataataggtagaaaaaatatttctaagggctttgaatttgaagttgttattaaaaatattaactttcaaaacggtatagaaaaatttttggctaaattaaataaaattgaagggagatctttaaatattaaaaatttagaaaaaaaagagcgtaaaaaaatatttgacaatttaataaatgaagttattggagagttggatgattttgattacactgaagttgttcatttttttagagtagttaagagttcttctgaaagttataaaatagagcttttaggagatgttttaaatatacagtctagaaataagcttattaatgatctttttttggttttatcgcctggaatttaa

SEQ ID NO: 501 - protein, 167 aa, Borrelia burgdorferi
MRIVIFIFGILLTSCFSRNGIESSSKKIKISMLVDGVLDDKSFNSSANEALLRLKKDFPENIEEVFSCAISGVYSSYVSDLDNLKRNGSDLIWLVGYMLTDASLLVSSENPKISYGIIDPIYGDDVQIPENLIAVVFRVEPRCFFGWLYCSQKKLFWQNRFYRGNEG

SEQ ID NO: 502 - protein, 153 aa, Borrelia burgdorferi
CFSRNGIESSSKKIKISMLVDGVLDDKSFNSSANEALLRLKKDFPENIEEVFSCAISGVYSSYVSDLDNLKRNGSDLIWLVGYMLTDASLLVSSENPKISYGIIDPIYGDDVQIPENLIAVVFRVEPRCFFGWLYCSQKKLFWQNRFYRGNEG

SEQ ID NO: 503 - DNA, 504 bp, Borrelia burgdorferi
atgagaattgtaatttttatattcggtattttgttgacttcttgctttagtagaaatggaatagaatctagttcaaaaaaaattaagatatccatgttggtagatggtgttcttgacgacaaatcttttaattctagtgctaatgaggctttattacgcttgaaaaaagattttccagaaaatattgaagaagttttttcttgtgctatttctggagtttattctagttatgtttcagatcttgataatttaaaaaggaatggctcagacttgatttggcttgtagggtacatgcttacggacgcatctttattggtttcatcggagaatccaaaaattagctatggaataatagatcccatttatggtgatgatgttcagattcctgaaaacttgattgctgttgttttcagagtagagccaaggtgcttttttggctggctatattgcagccaaaaaaagcttttctggcaaaataggttttatagggggaatgaagggtaa

SEQ ID NO: 504 - DNA, 462 bp, Borrelia burgdorferi
tgctttagtagaaatggaatagaatctagttcaaaaaaaattaagatatccatgttggtagatggtgttcttgacgacaaatcttttaattctagtgctaatgaggctttattacgcttgaaaaaagattttccagaaaatattgaagaagttttttcttgtgctatttctggagtttattctagttatgtttcagatcttgataatttaaaaaggaatggctcagacttgatttggcttgtagggtacatgcttacggacgcatctttattggtttcatcggagaatccaaaaattagctatggaataatagatcccatttatggtgatgatgttcagattcctgaaaacttgattgctgttgttttcagagtagagccaaggtgcttttttggctggctatattgcagccaaaaaaagcttttctggcaaaataggttttatagggggaatgaagggtaa

SEQ ID NO: 505 - protein, 264 aa, Borrelia burgdorferi
MKRILAMHDISSMGRTSLTICIPVISSFNMQVCPFVTAVLSASTAYKKFEIVDLTDHLEKFINIWKEQNEHFDILYTGFLGSEKQQITIEKIIKLIKFEKIVIDPVFADDGEIYPIFDNKIISGFRKIIKYANIITPNITELEMLSKSSKLNNKDDIIKAILNLDTKATVVVTSVKRGNLLGNICYNPKNKEYSEFFLEGLEQNFSGTGDLFTSLLIGYLEKFETEQALEKTTKAIHLIIKESIKENVSKKEGVRIENFLKNTF

SEQ ID NO: 506 - protein, 244 aa, Borrelia burgdorferi
CIPVISSFNMQVCPFVTAVLSASTAYKKFEIVDLTDHLEKFINIWKEQNEHFDILYTGFLGSEKQQITIEKIIKLIKFEKIVIDPVFADDGEIYPIFDNKIISGFRKIIKYANIITPNITELEMLSKSSKLNNKDDIIKAILNLDTKATVVVTSVKRGNLLGNICYNPKNKEYSEFFLEGLEQNFSGTGDLFTSLLIGYLEKFETEQALEKTTKAIHLIIKESIKENVSKKEGVRIENFLKNTF

SEQ ID NO: 507 - DNA, 795 bp, Borrelia burgdorferi
atgaaaagaattttagcaatgcatgatatttcaagcatgggaagaacatctcttacaatatgcataccagtaatatcttcgtttaatatgcaagtttgtccttttgtgacagctgtcctttctgcttccacagcttataaaaaatttgaaatagtggatttaaccgatcatttagaaaaatttatcaatatatggaaagaacaaaatgagcactttgacatactctataccggatttctgggaagcgaaaaacaacaaataacaatagagaaaataattaaattaataaaatttgaaaaaattgtaattgatcctgtgtttgctgacgatggagaaatttaccctatatttgataataaaataattagtggatttagaaaaatcataaagtacgcaaacataataacacccaatatcacagaacttgaaatgctaagcaaaagctcaaaacttaacaacaaagatgatatcataaaagcaatattaaatcttgatacaaaagcgacggtagttgttacaagcgttaaaaggggaaatctcttgggaaacatttgctacaatcctaaaaacaaagaatactcggagttttttttagaaggattagaacaaaatttcagtggaacaggagatttatttaccagcttacttataggatatttggaaaaatttgaaacagagcaagccttagaaaaaacaacaaaggctattcacctaataataaaagagtcaattaaagaaaatgtttcaaaaaaagaaggggtccgaattgaaaatttcttaaaaaatacattttga

SEQ ID NO: 508 - DNA, 735 bp, Borrelia burgdorferi
tgcataccagtaatatcttcgtttaatatgcaagtttgtccttttgtgacagctgtcctttctgcttccacagcttataaaaaatttgaaatagtggatttaaccgatcatttagaaaaatttatcaatatatggaaagaacaaaatgagcactttgacatactctataccggatttctgggaagcgaaaaacaacaaataacaatagagaaaataattaaattaataaaatttgaaaaaattgtaattgatcctgtgtttgctgacgatggagaaatttaccctatatttgataataaaataattagtggatttagaaaaatcataaagtacgcaaacataataacacccaatatcacagaacttgaaatgctaagcaaaagctcaaaacttaacaacaaagatgatatcataaaagcaatattaaatcttgatacaaaagcgacggtagttgttacaagcgttaaaaggggaaatctcttgggaaacatttgctacaatcctaaaaacaaagaatactcggagttttttttagaaggattagaacaaaatttcagtggaacaggagatttatttaccagcttacttataggatatttggaaaaatttgaaacagagcaagccttagaaaaaacaacaaaggctattcacctaataataaaagagtcaattaaagaaaatgtttcaaaaaaagaaggggtccgaattgaaaatttcttaaaaaatacattttga

SEQ ID NO: 509 - protein, 255 aa, Borrelia burgdorferi
MGLYLKLLRQSINLKSLFPLSVLFFSCNVVDTDFSVLEFKVANFNLNDDFSQGLLDSAYNILNRSFDLIIIKNLKNKNVLDLINNRVLFRAFKNAYFIDQGSGLSVSILSKRKINIKVLSVMQDSCDLKLGLLVDFKFENNHYGIVIYNLSKDFIKSIANLQISEQILYLKAQMDKLMFILDESEFVIFDLLIKNGFFSLINDSNYTSMLANKIDFRVFSNFFARVSLYSFMFVIADYLHSNYVVENFPQKIVIN

SEQ ID NO: 510 - protein, 229 aa, Borrelia burgdorferi
CNVVDTDFSVLEFKVANFNLNDDFSQGLLDSAYNILNRSFDLIIIKNLKNKNVLDLINNRVLFRAFKNAYFIDQGSGLSVSILSKRKINIKVLSVMQDSCDLKLGLLVDFKFENNHYGIVIYNLSKDFIKSIANLQISEQILYLKAQMDKLMFILDESEFVIFDLLIKNGFFSLINDSNYTSMLANKIDFRVFSNFFARVSLYSFMFVIADYLHSNYVVENFPQKIVIN

SEQ ID NO: 511 - DNA, 768 bp, Borrelia burgdorferi
atgggcttgtatttgaagttgttgagacaaagtatcaacttgaagagtttatttccgcttagtgttttatttttttcctgtaatgttgtagatacagattttagtgttttggagtttaaggttgcaaattttaatttaaatgatgatttttctcaagggttacttgattctgcttataatattctaaatcgaagttttgatttaataattattaagaatcttaagaataaaaatgttcttgatttaattaataatagagttttatttagagcttttaagaatgcttattttattgatcaaggtagtggcctttctgttagcattctttctaagcgcaaaataaatattaaagttttaagtgtaatgcaagattcttgcgatttaaaattaggattgcttgtggattttaaatttgagaataatcactatggtattgttatttataatttaagcaaggattttattaaaagtattgccaatttgcaaattagtgaacaaattttatatttaaaagcccaaatggataaattgatgtttattttagatgaatctgaatttgttatttttgatttattaatcaaaaatggattttttagcttaataaatgattcaaactacacttcaatgttagcaaataaaattgattttagagttttttctaatttttttgctagggtttctttatattcatttatgtttgtaattgcagattatttgcatagcaattatgttgttgagaattttcctcaaaaaatagttatcaattga

SEQ ID NO: 512 - DNA, 690 bp, Borrelia burgdorferi
tgtaatgttgtagatacagattttagtgttttggagtttaaggttgcaaattttaatttaaatgatgatttttctcaagggttacttgattctgcttataatattctaaatcgaagttttgatttaataattattaagaatcttaagaataaaaatgttcttgatttaattaataatagagttttatttagagcttttaagaatgcttattttattgatcaaggtagtggcctttctgttagcattctttctaagcgcaaaataaatattaaagttttaagtgtaatgcaagattcttgcgatttaaaattaggattgcttgtggattttaaatttgagaataatcactatggtattgttatttataatttaagcaaggattttattaaaagtattgccaatttgcaaattagtgaacaaattttatatttaaaagcccaaatggataaattgatgtttattttagatgaatctgaatttgttatttttgatttattaatcaaaaatggattttttagcttaataaatgattcaaactacacttcaatgttagcaaataaaattgattttagagttttttctaatttttttgctagggtttctttatattcatttatgtttgtaattgcagattatttgcatagcaattatgttgttgagaattttcctcaaaaaatagttatcaattga

SEQ ID NO: 513 - protein, 260 aa, Borrelia burgdorferi
MKTFVIIGLSNLGIHLLEDLSRLDCQIIIIDTSKELIEEYDVISTESFVVEQFTKNALKRIIPVDTDAVVIDFDDDLGKSALVTHYCNLLGLKEICVKTENRDDAEILKTLGATKIIFPSKDAARRLTPLLVSPNLSTYNIIGYDIIVAETVIPKEYVGKTLFEADLRRECGITVIAVRNLSNSRYEFVDGDYFFLKDDKIVICGKPDSIENFTNNKDLIKDLISGSKEDENLNKDAEKKSRFLGIFNFMKIFQKDRKDN

SEQ ID NO: 514 - protein, 236 aa, Borrelia burgdorferi
CQIIIIDTSKELIEEYDVISTESFVVEQFTKNALKRIIPVDTDAVVIDFDDDLGKSALVTHYCNLLGLKEICVKTENRDDAEILKTLGATKIIFPSKDAARRLTPLLVSPNLSTYNIIGYDIIVAETVIPKEYVGKTLFEADLRRECGITVIAVRNLSNSRYEFVDGDYFFLKDDKIVICGKPDSIENFTNNKDLIKDLISGSKEDENLNKDAEKKSRFLGIFNFMKIFQKDRKDN

SEQ ID NO: 515 - DNA, 783 bp, Borrelia burgdorferi
atgaaaacatttgttattattggacttagtaatttaggcattcacttacttgaagatttaagcaggcttgattgtcaaattattattatagatacatctaaagagcttattgaagaatatgatgtgatatctacagaaagctttgttgttgagcaattcactaaaaatgctttgaaaagaataattccagtagatacagacgctgttgttattgattttgatgatgatcttggcaaaagtgctcttgttactcactattgtaatcttttaggtttgaaagaaatatgcgttaagacagaaaatagagatgatgctgaaatcttaaaaactcttggggcaacaaaaattatatttccaagtaaagatgctgcaagaagattaactccattattagtatctccaaatctttcaacttataatattattgggtatgatattattgttgctgaaactgttattcccaaagaatatgttggtaaaactctttttgaagccgatcttagaagagaatgtgggattacagttattgctgttagaaatttaagtaattctaggtatgaatttgttgatggcgattatttttttttaaaagatgataaaattgtaatttgtggtaaaccagatagcattgaaaattttacaaataataaagatttaattaaagatttaatttcaggctctaaagaggatgaaaatttaaataaagatgctgagaaaaaatctagatttttagggattttcaattttatgaaaatttttcaaaaagatcgtaaggataattag

SEQ ID NO: 516 - DNA, 711 bp, Borrelia burgdorferi
tgtcaaattattattatagatacatctaaagagcttattgaagaatatgatgtgatatctacagaaagctttgttgttgagcaattcactaaaaatgctttgaaaagaataattccagtagatacagacgctgttgttattgattttgatgatgatcttggcaaaagtgctcttgttactcactattgtaatcttttaggtttgaaagaaatatgcgttaagacagaaaatagagatgatgctgaaatcttaaaaactcttggggcaacaaaaattatatttccaagtaaagatgctgcaagaagattaactccattattagtatctccaaatctttcaacttataatattattgggtatgatattattgttgctgaaactgttattcccaaagaatatgttggtaaaactctttttgaagccgatcttagaagagaatgtgggattacagttattgctgttagaaatttaagtaattctaggtatgaatttgttgatggcgattatttttttttaaaagatgataaaattgtaatttgtggtaaaccagatagcattgaaaattttacaaataataaagatttaattaaagatttaatttcaggctctaaagaggatgaaaatttaaataaagatgctgagaaaaaatctagatttttagggattttcaattttatgaaaatttttcaaaaagatcgtaaggataattag

SEQ ID NO: 517 - protein, 222 aa, Borrelia burgdorferi
MLIARIMNINTLFYGMIIIIFALISCNHKNIQYDKRIKKFLDKNKIEYKIDSENDFIAFKDINNNEKEEVIIRSRLNSYKNSKIREIFGIVKVFDINTPKIKEISDSLMSDSYNNRVFGSWEIIHNAERGINSLVYIVKAEEFANDTFLLDAIDEIASTISIFKKIITTNNENIDNNEENNNTNESNEQPTLKQEKTNSTKESNNELKEDQIEEELQEIKAQ

SEQ ID NO: 518 - protein, 197 aa, Borrelia burgdorferi
CNHKNIQYDKRIKKFLDKNKIEYKIDSENDFIAFKDINNNEKEEVIIRSRLNSYKNSKIREIFGIVKVFDINTPKIKEISDSLMSDSYNNRVFGSWEIIHNAERGINSLVYIVKAEEFANDTFLLDAIDEIASTISIFKKIITTNNENIDNNEENNNTNESNEQPTLKQEKTNSTKESNNELKEDQIEEELQEIKAQ

SEQ ID NO: 519 - DNA, 669 bp, Borrelia burgdorferi
atgctaattgcaagaataatgaatattaatacattattctacggcatgatcattatcatttttgcactcatttcttgcaatcataagaatatacagtacgacaagagaattaaaaaatttttagataaaaacaaaattgaatataaaatagactcagaaaatgactttatagcatttaaagatataaacaataacgaaaaagaagaagtaatcatcagatcaagactaaactcatataaaaattcaaagataagagaaatatttggaattgttaaagtatttgatataaacacaccaaaaataaaagaaatatctgactcgcttatgagcgatagttataataacagagtatttggatcgtgggagattattcataatgcagaaagaggaatcaactctttggtatatattgtaaaagcagaagaatttgcaaatgatacatttttgcttgatgcaattgatgagattgcctcaacaataagtattttcaaaaaaataataacaaccaacaacgaaaacattgataataatgaagaaaataacaatacaaatgaatcaaatgaacagcccaccttaaagcaagaaaaaacaaattcaacaaaagaatctaataacgaacttaaagaagatcaaatagaagaagaacttcaagaaatcaaagcccaataa

SEQ ID NO: 520 - DNA, 594 bp, Borrelia burgdorferi
tgcaatcataagaatatacagtacgacaagagaattaaaaaatttttagataaaaacaaaattgaatataaaatagactcagaaaatgactttatagcatttaaagatataaacaataacgaaaaagaagaagtaatcatcagatcaagactaaactcatataaaaattcaaagataagagaaatatttggaattgttaaagtatttgatataaacacaccaaaaataaaagaaatatctgactcgcttatgagcgatagttataataacagagtatttggatcgtgggagattattcataatgcagaaagaggaatcaactctttggtatatattgtaaaagcagaagaatttgcaaatgatacatttttgcttgatgcaattgatgagattgcctcaacaataagtattttcaaaaaaataataacaaccaacaacgaaaacattgataataatgaagaaaataacaatacaaatgaatcaaatgaacagcccaccttaaagcaagaaaaaacaaattcaacaaaagaatctaataacgaacttaaagaagatcaaatagaagaagaacttcaagaaatcaaagcccaataa

SEQ ID NO: 521 - protein, 175 aa, Borrelia burgdorferi
MRVDLLPLVELSLYINLSFCCKDFSIFNRILEELKCHLILLGHPIIKTLYIKHVDFCLSRQDNLKFIFTSLSKYINLELLEEFTLEIIPGYVDFEKFKLLDEFCITRINLNVQSFSLEFRKIVGIPEISYKKLNILINNIRKFPFDLNIDMTVNMPLQKKSHLKRDLQRIAFIYA

SEQ ID NO: 522 - protein, 155 aa, Borrelia burgdorferi
CKDFSIFNRILEELKCHLILLGHPIIKTLYIKHVDFCLSRQDNLKFIFTSLSKYINLELLEEFTLEIIPGYVDFEKFKLLDEFCITRINLNVQSFSLEFRKIVGIPEISYKKLNILINNIRKFPFDLNIDMTVNMPLQKKSHLKRDLQRIAFIYA

SEQ ID NO: 523 - DNA, 528 bp, Borrelia burgdorferi
atgagagtagatcttttacctcttgtcgagttaagtctttatattaatttgtcattttgttgtaaagattttagcatttttaatagaattttagaggaattaaaatgtcatttaatcttgctgggtcatccaattataaaaacactttacattaagcacgtagatttttgtttatctaggcaagataatttaaaatttattttcacttctttgtccaagtatattaatttggagttattagaagaatttactttagaaattattccgggttatgttgattttgaaaaattcaaacttttggatgaattttgtattactagaattaatcttaatgttcaaagtttttctttagagtttagaaagattgtggggatacccgaaatttcttataaaaaattgaatattttgattaacaatattagaaagtttccttttgatttgaatattgacatgactgtcaatatgcctttgcaaaaaaaatctcatctcaagcgagatttgcaaagaattgctttcatatatgcctga

SEQ ID NO: 524 - DNA, 468 bp, Borrelia burgdorferi
tgtaaagattttagcatttttaatagaattttagaggaattaaaatgtcatttaatcttgctgggtcatccaattataaaaacactttacattaagcacgtagatttttgtttatctaggcaagataatttaaaatttattttcacttctttgtccaagtatattaatttggagttattagaagaatttactttagaaattattccgggttatgttgattttgaaaaattcaaacttttggatgaattttgtattactagaattaatcttaatgttcaaagtttttctttagagtttagaaagattgtggggatacccgaaatttcttataaaaaattgaatattttgattaacaatattagaaagtttccttttgatttgaatattgacatgactgtcaatatgcctttgcaaaaaaaatctcatctcaagcgagatttgcaaagaattgctttcatatatgcctga

SEQ ID NO: 525 - protein, 274 aa, Borrelia burgdorferi; identical to SEQ ID NO: 261

SEQ ID NO: 526 - protein, 257 aa, Borrelia burgdorferi
CASLPYTPPKQNLNYLMELLPGANLYAHVNLIKNRSIYNSLSPKYKSVLGLISNLYFSYKKENNDFALLIMGNFPKDIFWGIHKNRNTESIGNIFTNPKWKLKNSNIYIIPNKARTSIAITQKDITAKDNNMLTTKYIGEIEKNEMFFWIQDPTLLLPNQIVSSKNLIPFSSGTLSINSLNQEEYIFKSLIKTNNPPILKILSKKLIPTVLTNMTNLTISSHIKTTIKDQNTVEIEFNIQKSSVESLIEKLASNIQT

SEQ ID NO: 527 - DNA, 825 bp, Borrelia burgdorferi; identical to SEQ ID NO: 263

SEQ ID NO: 528 - DNA, 774 bp, Borrelia burgdorferi
tgcgcaagcctgccttacactcctccaaaacaaaatctaaattacttaatggaacttttacctggcgcaaatttatacgcccatgtaaatttaattaaaaacaggtctatttataactctttaagccctaaatataaatcagttcttgggcttataagcaatttatactttagctataaaaaagaaaataacgattttgctctactaataatgggtaatttcccaaaagatattttctggggaattcataaaaatagaaatacagaatcaataggcaatatatttacaaatccaaaatggaaacttaaaaattcaaatatatacattattccaaacaaagctagaactagcattgcaataacccaaaaagatataaccgcaaaagacaataatatgctaacaacaaaatatattggggaaatagaaaaaaatgaaatgtttttttggattcaagatccaacattattgctcccaaaccaaatagtaagcagcaaaaatttaattccctttagcagtggaactttgtctataaacagcttaaatcaagaagaatatatttttaaatccttaatcaaaacaaataatccaccaatactaaaaatattgtcaaaaaagttaattccaaccgtcttgacaaacatgacaaacctcacaatatcaagccacataaagaccacaataaaagaccaaaatacggttgaaatagaatttaatattcaaaaatctagtgttgaaagccttatagaaaaactagcttcaaatattcaaacctaa

SEQ ID NO: 529 - protein, 123 aa, Borrelia burgdorferi; identical to SEQ ID NO: 457

SEQ ID NO: 530 - protein, 108 aa, Borrelia burgdorferi; identical to SEQ ID NO: 458

SEQ ID NO: 531 - DNA, 372 bp, Borrelia burgdorferi; identical to SEQ ID NO: 459

SEQ ID NO: 532 - DNA, 327 bp, Borrelia burgdorferi; identical to SEQ ID NO: 460

SEQ ID NO: 533 - protein, 155 aa, Borrelia burgdorferi; identical to SEQ ID NO: 45

SEQ ID NO: 534 - protein, 140 aa, Borrelia burgdorferi
CNLSTMHKIDTKEDMKILYSEIAELRKKLNLNHLEIDDTLEKVAKEYAIKLGENRTITHTLFGTTPMQRIHKYDQSFNLTREILASGIELNRVVNAWLNSPSHKEALINTDTDKIGGYRLKTTDNIDIFVVLFGKRKYKN

SEQ ID NO: 535 - DNA, 468 bp, Borrelia burgdorferi; identical to SEQ ID NO: 47

SEQ ID NO: 536 - DNA, 423 bp, Borrelia burgdorferi
tgcaatttaagtacaatgcataaaatagatacaaaagaagatatgaaaattctatattcagaaattgctgaattgagaaaaaaattaaatctaaaccatctagaaatagatgatacccttgaaaaagttgcaaaagaatatgccattaaactgggagaaaatagaacaataactcacaccctttttggcacaaccccaatgcaaagaatacataaatacgatcaatcctttaatttaacaagagaaatactggcatcaggaattgaacttaacagagtagttaatgcatggcttaatagtccaagccacaaagaagctcttattaatacagataccgataaaataggtggctatagattaaaaacgactgacaatatagatatatttgtagttctttttggaaaaagaaaatataagaattga

SEQ ID NO: 537 - protein, 157 aa, Borrelia burgdorferi
MIRVLLGSLAVSFLFSICMVFLNYDNLFSKKVFYFHSSKGFVANLRYLRDEQNLKDNLDLLVKDFLLGSNEGFSFGFLLSDSRFLYSFLKNGVYYVNLSREFYDSFNNGDYNESNESFDVKVNLFAMSLIKTMRFNYPGKIKKIVILVEGCILKEQS

SEQ ID NO: 538 - protein, 140 aa, Borrelia burgdorferi
CMVFLNYDNLFSKKVFYFHSSKGFVANLRYLRDEQNLKDNLDLLVKDFLLGSNEGFSFGFLLSDSRFLYSFLKNGVYYVNLSREFYDSFNNGDYNESNESFDVKVNLFAMSLIKTMRFNYPGKIKKIVILVEGCILKEQS

SEQ ID NO: 539 - DNA, 474 bp, Borrelia burgdorferi
atgattagggtgcttttggggtctttggcagtaagctttttgttttctatttgtatggtttttttaaattatgataatcttttttcaaaaaaggttttttattttcattctagcaagggatttgttgctaatttaagatatttaagagatgaacaaaatttgaaagataatttagatcttttagtaaaagattttcttttaggaagcaatgaagggttttcttttgggtttttattaagtgattcaagatttttatattcttttttaaagaatggagtttattatgtaaatctttcaagagaattttatgattcttttaataatggtgattataatgaatctaatgaatcttttgatgttaaggtcaatctttttgctatgtctttaataaaaacaatgcgctttaactatcctggtaagataaaaaagattgttattcttgttgaagggtgtatcttaaaggagcaaagttga

SEQ ID NO: 540 - DNA, 423 bp, Borrelia burgdorferi
tgtatggtttttttaaattatgataatcttttttcaaaaaaggttttttattttcattctagcaagggatttgttgctaatttaagatatttaagagatgaacaaaatttgaaagataatttagatcttttagtaaaagattttcttttaggaagcaatgaagggttttcttttgggtttttattaagtgattcaagatttttatattcttttttaaagaatggagtttattatgtaaatctttcaagagaattttatgattcttttaataatggtgattataatgaatctaatgaatcttttgatgttaaggtcaatctttttgctatgtctttaataaaaacaatgcgctttaactatcctggtaagataaaaaagattgttattcttgttgaagggtgtatcttaaaggagcaaagttga

SEQ ID NO: 541 - protein, 168 aa, Borrelia burgdorferi
MAIKYARENNIPFLGICLGLQLAVIEFARNVCGILDADTEENLARDKPLKSPVIHLLPEQKGIKDKGATMRLGGYPVILKKNTIAFKLYGQDRIIERFRHRYEVNNDYIDLFAKNGLIVSGFSSDFKMAKLIEIPENKFFVACQFHPELITRIENPAKLFLGLIKACI

SEQ ID NO: 542 - protein, 152 aa, Borrelia burgdorferi
CLGLQLAVIEFARNVCGILDADTEENLARDKPLKSPVIHLLPEQKGIKDKGATMRLGGYPVILKKNTIAFKLYGQDRIIERFRHRYEVNNDYIDLFAKNGLIVSGFSSDFKMAKLIEIPENKFFVACQFHPELITRIENPAKLFLGLIKACI

SEQ ID NO: 543 - DNA, 507 bp, Borrelia burgdorferi
atggctattaaatatgctcgtgagaataatattccctttcttggaatttgtcttggtttgcagcttgctgtaatagaatttgctcgtaatgtttgtggaatacttgatgctgatacggaggaaaatttagcaagagacaagcccttaaaaagtcctgttatccatttacttcctgagcaaaagggaattaaagataagggcgctacaatgaggcttggtggatatcctgtgattcttaaaaagaatacaatagcttttaaactttatggccaagatcggataattgaaagatttagacataggtatgaagtcaataatgattatatagatttatttgcaaaaaatgggcttatagtatctggattttcaagtgattttaaaatggcaaaattaatagaaattcctgaaaataaatttttcgtagcttgccagtttcatccagaacttattacaagaatagaaaatccagccaagctttttctaggattaattaaagcttgtatttga

SEQ ID NO: 544 - DNA, 459 bp, Borrelia burgdorferi
tgtcttggtttgcagcttgctgtaatagaatttgctcgtaatgtttgtggaatacttgatgctgatacggaggaaaatttagcaagagacaagcccttaaaaagtcctgttatccatttacttcctgagcaaaagggaattaaagataagggcgctacaatgaggcttggtggatatcctgtgattcttaaaaagaatacaatagcttttaaactttatggccaagatcggataattgaaagatttagacataggtatgaagtcaataatgattatatagatttatttgcaaaaaatgggcttatagtatctggattttcaagtgattttaaaatggcaaaattaatagaaattcctgaaaataaatttttcgtagcttgccagtttcatccagaacttattacaagaatagaaaatccagccaagctttttctaggattaattaaagcttgtatttga

SEQ ID NO: 545 - protein, 497 aa, Borrelia burgdorferi
  SITE (198): Xaa equals any of the naturally occurring L-amino acids
MNKTKNRSLTYFIILSCISLFGANNNTISYSSIEIPLEDLSEEFKSSGNKSDQINTSKHLNKNIVSYEDPKKGKDLKLPENIRDKKLPQKRMDENDLKSVIENYENKIKNIEKLLKTKNQKTSENENKKIESIEKKAKKYEILTNKLKNEIVEIKKLLNKKIKPKEDENYEKINIENIEEETDDDFEDNYEYNDEIEXTNEDNYPSNEGIINNLKENLNENEKYYAINEKKIDELEDRINENENTILDLQRELRNFKKKDNSDKNLEEIEENLSSIGRIINDLKRKISANEAINKENQKKIRTDKHKLKELEDKIKENEETILKLQKELNNFKKKEIYQKPLNEETFTPSITSKNDDLEENKKLKKEYLKPIEKKESRDLEENTKSTPKTTMIKTADFQIYPDIYLNNYKFKEKGDQFAFKKENTYYIEIDPTNNLNEALKNHEIISKYKFEKYFINPILKNKEEFFRNLIEVKNIHELGIMYKNLKPEFKQIKIIK

SEQ ID NO: 546 - protein, 481 aa, Borrelia burgdorferi
  SITE (182): Xaa equals any of the naturally occurring L-amino acids
CISLFGANNNTISYSSIEIPLEDLSEEFKSSGNKSDQINTSKHLNKNIVSYEDPKKGKDLKLPENIRDKKLPQKRMDENDLKSVIENYENKIKNIEKLLKTKNQKTSENENKKIESIEKKAKKYEILTNKLKNEIVEIKKLLNKKIKPKEDENYEKINIENIEEETDDDFEDNYEYNDEIEXTNEDNYPSNEGIINNLKENLNENEKYYAINEKKIDELEDRINENENTILDLQRELRNFKKKDNSDKNLEEIEENLSSIGRIINDLKRKISANEAINKENQKKIRTDKHKLKELEDKIKENEETILKLQKELNNFKKKEIYQKPLNEETFTPSITSKNDDLEENKKLKKEYLKPIEKKESRDLEENTKSTPKTTMIKTADFQIYPDIYLNNYKFKEKGDQFAFKKENTYYIEIDPTNNLNEALKNHEIISKYKFEKYFINPILKNKEEFFRNLIEVKNIHELGIMYKNLKPEFKQIKIIK

SEQ ID NO: 547 - DNA, 1493 bp, Borrelia burgdorferi
atgaataaaacaaaaaatcgaagccttacgtattttataatactttcatgtatatcattatttggggctaataataatacaataagctactctagcattgaaattcctctagaagacttaagtgaagaatttaaaagttctgggaataaaagcgatcaaataaatacctcaaaacatttaaacaaaaacatagtttcttatgaagacccaaaaaagggtaaagatctaaaattgccagaaaatataagagacaaaaaactaccccaaaaaagaatggacgaaaatgatctaaaatctgtaattgaaaattatgaaaataaaattaaaaacatagaaaagcttttaaaaaccaaaaatcaaaaaacatcggaaaatgaaaataaaaaaatagaatcaatcgaaaaaaaagcaaaaaaatatgaaattttaaccaataaattaaaaaacgaaatagtagaaataaaaaagctccttaacaaaaaaatcaagcctaaagaagatgaaaattacgaaaaaataaatattgaaaacattgaagaagaaactgatgatgattttgaagacaattatgaatataatgatgaaattgaagaacaaatgaggacaattacccttctaatgaaggaataataaacaatctaaaagaaaatcttaatgaaaacgaaaaatattatgctattaatgaaaaaaaaatcgatgaacttgaagacagaatcaacgagaatgaaaacactattttagacttgcaaagagaattaaggaattttaaaaaaaaagataactcagataaaaacttagaagaaattgaggaaaatttatcttcaataggaagaataattaatgatctaaaaagaaaaatcagcgcaaatgaagcaataaacaaagaaaatcaaaaaaaaataagaactgataaacacaaactcaaagaattagaagataaaataaaggaaaatgaagagactattttaaaacttcaaaaagaattaaacaattttaaaaaaaaagaaatttatcaaaaacccttaaatgaagaaactttcactccaagcattacaagtaaaaatgacgacttagaagaaaataagaaattaaaaaaggaatatttaaagcccatagaaaaaaaagaaagccgagatctagaagaaaatactaaaagcaccccaaaaacaactatgataaaaacagcagattttcaaatctaccctgacatatatcttaataattataaatttaaagaaaagggagatcaatttgcatttaaaaaagaaaacacatactatattgaaatagatcccactaacaatttaaatgaggctttaaaaaatcatgaaataatctcaaaatataaatttgaaaaatatttcattaaccctattctaaaaaataaagaagaattttttagaaacttaatagaagtcaaaaatatccacgaactaggaattatgtataaaaatctaaagcctgaatttaagcaaataaaaataattaaataa

SEQ ID NO: 548 - DNA, 1445 bp, Borrelia burgdorferi
tgtatatcattatttggggctaataataatacaataagctactctagcattgaaattcctctagaagacttaagtgaagaatttaaaagttctgggaataaaagcgatcaaataaatacctcaaaacatttaaacaaaaacatagtttcttatgaagacccaaaaaagggtaaagatctaaaattgccagaaaatataagagacaaaaaactaccccaaaaaagaatggacgaaaatgatctaaaatctgtaattgaaaattatgaaaataaaattaaaaacatagaaaagcttttaaaaaccaaaaatcaaaaaacatcggaaaatgaaaataaaaaaatagaatcaatcgaaaaaaaagcaaaaaaatatgaaattttaaccaataaattaaaaaacgaaatagtagaaataaaaaagctccttaacaaaaaaatcaagcctaaagaagatgaaaattacgaaaaaataaatattgaaaacattgaagaagaaactgatgatgattttgaagacaattatgaatataatgatgaaattgaagaacaaatgaggacaattacccttctaatgaaggaataataaacaatctaaaagaaaatcttaatgaaaacgaaaaatattatgctattaatgaaaaaaaaatcgatgaacttgaagacagaatcaacgagaatgaaaacactattttagacttgcaaagagaattaaggaattttaaaaaaaaagataactcagataaaaacttagaagaaattgaggaaaatttatcttcaataggaagaataattaatgatctaaaaagaaaaatcagcgcaaatgaagcaataaacaaagaaaatcaaaaaaaaataagaactgataaacacaaactcaaagaattagaagataaaataaaggaaaatgaagagactattttaaaacttcaaaaagaattaaacaattttaaaaaaaaagaaatttatcaaaaacccttaaatgaagaaactttcactccaagcattacaagtaaaaatgacgacttagaagaaaataagaaattaaaaaaggaatatttaaagcccatagaaaaaaaagaaagccgagatctagaagaaaatactaaaagcaccccaaaaacaactatgataaaaacagcagattttcaaatctaccctgacatatatcttaataattataaatttaaagaaaagggagatcaatttgcatttaaaaaagaaaacacatactatattgaaatagatcccactaacaatttaaatgaggctttaaaaaatcatgaaataatctcaaaatataaatttgaaaaatatttcattaaccctattctaaaaaataaagaagaattttttagaaacttaatagaagtcaaaaatatccacgaactaggaattatgtataaaaatctaaagcctgaatttaagcaaataaaaataattaaataa

SEQ ID NO: 549 - protein, 575 aa, Borrelia burgdorferi
MNTKGKVVGVNGNLVTIEVEGSVSMNEVLFVKTAGRNLKAEVIRIRGNEVDAQVFELTKGISVGDLVEFTDKLLTVELGPGLLTQVYDGLQNPLPELAIQCGFFLERGVYLRPLNKDKKWNFKKTSKVGDIVIAGDFLGFVIEGTVHHQIMIPFYKRDSYKIVEIVSDGDYSIDEQIAVIEDDSGMRHNITMSFHWPVKVPITNYKERLIPSEPMLTQTRIIDTFFPVAKGGTFCIPGPFGAGKTVLQQVTSRNADVDVVIIAACGERAGEVVETLKEFPELMDPKTGKSLMDRTCIICNTSSMPVAAREASVYTAITIGEYYRQMGLDILLLADSTSRWAQAMREMSGRLEEIPGEEAFPAYLESVIASFYERAGIVVLNNGDIGSVTVGGSVSPAGGNFEEPVTQATLKVVGAFHGLTRERSDARKFPAISPLESWSKYKGVIDQKKTEYARSFLVKGNEINQMMKVVGEEGISNDDFLIYLKSELLDSCYLQQNSFDSIDAAVSSERQNYMFDIVYNILKTNFEFSDKLQARDFINELRQNLLDMNLSSFKDHKFNKLEHALGELINFKKVI

SEQ ID NO: 550 - protein, 541 aa, Borrelia burgdorferi
GRNLKAEVIRIRGNEVDAQVFELTKGISVGDLVEFTDKLLTVELGPGLLTQVYDGLQNPLPELAIQCGFFLERGVYLRPLNKDKKWNFKKTSKVGDIVIAGDFLGFVIEGTVHHQIMIPFYKRDSYKIVEIVSDGDYSIDEQIAVIEDDSGMRHNITMSFHWPVKVPITNYKERLIPSEPMLTQTRIIDTFFPVAKGGTFCIPGPFGAGKTVLQQVTSRNADVDVVIIAACGERAGEVVETLKEFPELMDPKTGKSLMDRTCIICNTSSMPVAAREASVYTAITIGEYYRQMGLDILLLADSTSRWAQAMREMSGRLEEIPGEEAFPAYLESVIASFYERAGIVVLNNGDIGSVTVGGSVSPAGGNFEEPVTQATLKVVGAFHGLTRERSDARKFPAISPLESWSKYKGVIDQKKTEYARSFLVKGNEINQMMKVVGEEGISNDDFLIYLKSELLDSCYLQQNSFDSIDAAVSSERQNYMFDIVYNILKTNFEFSDKLQARDFINELRQNLLDMNLSSFKDHKFNKLEHALGELINFKKVI

SEQ ID NO: 551 - DNA, 1728 bp, Borrelia burgdorferi
atgaatacaaaaggaaaagtcgttggagttaatggaaacttagttactattgaggtagaaggttcagtttctatgaatgaagttttatttgtaaagactgctggtaggaatttaaaagcagaagtaattcgtattaggggcaatgaagttgatgcacaggtttttgaattgacaaaagggatatctgttggagacctagttgaatttacagacaaacttttaacagttgaactcggaccagggcttttaactcaagtatatgatgggcttcaaaatcctttgcctgaattggctattcaatgtggattttttttagaaaggggagtatatttaaggcccttgaataaagataaaaagtggaattttaaaaaaacctccaaagttggagatatcgttattgcaggagattttttaggttttgtaattgagggaactgttcaccatcaaataatgattccattttataaaagggattcttataaaattgtggagattgtaagtgatggcgactattcgattgatgagcaaattgctgtaattgaagatgattctggtatgaggcataatattacaatgtcttttcattggcctgttaaagttcctattactaattataaggaacgccttattcctagtgaacctatgttgactcaaactagaattatagatacatttttcccagttgccaaaggtggaactttttgcattccgggtccttttggagcaggaaaaacggttcttcagcaggttacaagtcgaaatgctgatgttgatgtagtgattattgcagcttgtggtgagcgagcaggagaagtggtagaaactcttaaagaatttcccgaattaatggatccaaaaaccggcaaatctttaatggacaggacttgtattatttgtaatacatcttcaatgccagttgcagctagagaagcttctgtttatactgctattactattggtgagtattacaggcaaatgggccttgatattcttcttttggcagattcaacttcaagatgggctcaagcaatgagagaaatgtctggacgccttgaggaaattcctggcgaggaggcttttccggcatatcttgagtctgttattgcttccttttatgaaagggcaggtattgtagttcttaataatggggatattggatctgtaacagttggtggctctgtaagtcctgctggtggtaattttgaagagccagttactcaagcaactttaaaagttgtaggagcatttcacgggcttacaagagaaaggtctgatgctaggaaatttccagctattagtcctcttgaatcttggagtaaatataaaggcgttattgatcaaaaaaagactgaatatgcaagatcttttttggtgaaaggtaatgaaattaatcaaatgatgaaagttgttggagaagaaggcataagtaacgatgattttttaatttatttaaaatccgagctacttgattcgtgctatttgcagcaaaattcatttgattctattgatgctgctgttagttcagagcgtcaaaattatatgtttgatatagtttataacattcttaaaactaactttgagttttctgataaacttcaagcaagagattttataaatgagttaaggcaaaatcttttagacatgaatctttcttcttttaaggatcataagtttaataaattggagcatgctttgggtgaattgataaattttaaaaaggtaatttag

SEQ ID NO: 552 - DNA, 1626 bp, Borrelia burgdorferi
ggtaggaatttaaaagcagaagtaattcgtattaggggcaatgaagttgatgcacaggtttttgaattgacaaaagggatatctgttggagacctagttgaatttacagacaaacttttaacagttgaactcggaccagggcttttaactcaagtatatgatgggcttcaaaatcctttgcctgaattggctattcaatgtggattttttttagaaaggggagtatatttaaggcccttgaataaagataaaaagtggaattttaaaaaaacctccaaagttggagatatcgttattgcaggagattttttaggttttgtaattgagggaactgttcaccatcaaataatgattccattttataaaagggattcttataaaattgtggagattgtaagtgatggcgactattcgattgatgagcaaattgctgtaattgaagatgattctggtatgaggcataatattacaatgtcttttcattggcctgttaaagttcctattactaattataaggaacgccttattcctagtgaacctatgttgactcaaactagaattatagatacatttttcccagttgccaaaggtggaactttttgcattccgggtccttttggagcaggaaaaacggttcttcagcaggttacaagtcgaaatgctgatgttgatgtagtgattattgcagcttgtggtgagcgagcaggagaagtggtagaaactcttaaagaatttcccgaattaatggatccaaaaaccggcaaatctttaatggacaggacttgtattatttgtaatacatcttcaatgccagttgcagctagagaagcttctgtttatactgctattactattggtgagtattacaggcaaatgggccttgatattcttcttttggcagattcaacttcaagatgggctcaagcaatgagagaaatgtctggacgccttgaggaaattcctggcgaggaggcttttccggcatatcttgagtctgttattgcttccttttatgaaagggcaggtattgtagttcttaataatggggatattggatctgtaacagttggtggctctgtaagtcctgctggtggtaattttgaagagccagttactcaagcaactttaaaagttgtaggagcatttcacgggcttacaagagaaaggtctgatgctaggaaatttccagctattagtcctcttgaatcttggagtaaatataaaggcgttattgatcaaaaaaagactgaatatgcaagatcttttttggtgaaaggtaatgaaattaatcaaatgatgaaagttgttggagaagaaggcataagtaacgatgattttttaatttatttaaaatccgagctacttgattcgtgctatttgcagcaaaattcatttgattctattgatgctgctgttagttcagagcgtcaaaattatatgtttgatatagtttataacattcttaaaactaactttgagttttctgataaacttcaagcaagagattttataaatgagttaaggcaaaatcttttagacatgaatctttcttcttttaaggatcataagtttaataaattggagcatgctttgggtgaattgataaattttaaaaaggtaatttag

SEQ ID NO: 553 - protein, 434 aa, Borrelia burgdorferi
MKRVYSKIESIAGNVITVTAQGIKYGELAIVKAKDTSSLAEVIKLDREKVSLQVYGGTRGVSTSDEIKFLGHSMQVSFSDNLLGRIFDGSGNPRDGGPSLDDNLIEIGGPSANPTKRIVPRNMIRTGLPMIDVFNTLVESQKLPIFSVSGEPYNELLIRIALQAEVDLIILGGMGLKHDDYLTFKDSLEKGGALSRAIFFVHTANDSVVESLTVPDISLSVAEKFALKGKKVLVLLTDMTNFADAMKEISITMEQVPSNRGYPGDLYSQLAYRYEKAIDFEGAGSITILAVTTMPGDDVTHPVPDNTGYITEGQYYLKGGRIEPFGSLSRLKQMVNSRTRDDHRTIMDSMIKLYASSKESVEKKAMGFNMTKWDEKLLKYSNMFESKMMDLSVNIPLEEALDLGWSILASCFSPKETGIKTDLIEKYWPKKETY

SEQ ID NO: 554 - protein, 414 aa, Borrelia burgdorferi
QGIKYGELAIVKAKDTSSLAEVIKLDREKVSLQVYGGTRGVSTSDEIKFLGHSMQVSFSDNLLGRIFDGSGNPRDGGPSLDDNLIEIGGPSANPTKRIVPRNMIRTGLPMIDVFNTLVESQKLPIFSVSGEPYNELLIRIALQAEVDLIILGGMGLKHDDYLTFKDSLEKGGALSRAIFFVHTANDSVVESLTVPDISLSVAEKFALKGKKVLVLLTDMTNFADAMKEISITMEQVPSNRGYPGDLYSQLAYRYEKAIDFEGAGSITILAVTTMPGDDVTHPVPDNTGYITEGQYYLKGGRIEPFGSLSRLKQMVNSRTRDDHRTIMDSMIKLYASSKESVEKKAMGFNMTKWDEKLLKYSNMFESKMMDLSVNIPLEEALDLGWSILASCFSPKETGIKTDLIEKYWPKKETY

SEQ ID NO: 555 - DNA, 1305 bp, Borrelia burgdorferi
atgaaaagagtctatagtaaaatagagtctatagcaggcaatgtaataactgttacagctcaaggtattaagtatggtgagcttgctattgtaaaagcaaaagatacaagttctctagccgaagtaattaaacttgatcgagaaaaagtttctcttcaggtttatggtggtacaagaggtgtttccacgtcagacgagataaagtttttagggcattcaatgcaggtttcattttctgacaatttgttgggcagaatttttgatggttctgggaatcctagagatgggggcccttctcttgatgataatttgattgaaattggtgggccttctgcaaatcctacaaaacgcattgttcctagaaatatgataaggacagggcttccaatgatagatgtttttaatactcttgttgaatctcaaaaattgccaattttttctgtttctggtgagccttataatgagcttcttataagaattgcacttcaagcagaagttgatttaataattcttggcggaatgggacttaagcatgatgattatttaacttttaaagattctttagaaaagggaggtgctttaagtagagcaattttttttgttcatactgctaatgattctgttgttgaatctttaactgttcctgatatttcactttctgttgctgaaaagtttgctctaaagggcaaaaaagttttggtgcttctcacagacatgacaaattttgctgatgcaatgaaagaaatatctattacaatggaacaagtgccttctaatagaggttatcccggggatttgtattctcagcttgcatatcgttatgagaaggctattgactttgaaggcgcaggatcaattacaatacttgcagttacaacaatgccgggtgacgatgttactcatcctgttcctgacaatactggatacattacagaaggtcaatactatttaaaaggtggcagaatagagccttttgggtctctttcaagacttaagcaaatggtaaatagtagaactagagacgatcacaggactataatggattcaatgatcaagctttatgcatcttcaaaagagtctgtagaaaaaaaggctatgggatttaatatgactaagtgggatgaaaaattgctcaagtatagcaatatgtttgaaagtaagatgatggatttgtctgttaatattcctttagaagaggctttagatttaggttggagcattcttgctagttgttttagcccaaaagaaacgggaataaaaacagatcttattgaaaaatattggcctaaaaaagagacttattga

SEQ ID NO: 556 - DNA, 1245 bp, Borrelia burgdorferi
caaggtattaagtatggtgagcttgctattgtaaaagcaaaagatacaagttctctagccgaagtaattaaacttgatcgagaaaaagtttctcttcaggtttatggtggtacaagaggtgtttccacgtcagacgagataaagtttttagggcattcaatgcaggtttcattttctgacaatttgttgggcagaatttttgatggttctgggaatcctagagatgggggcccttctcttgatgataatttgattgaaattggtgggccttctgcaaatcctacaaaacgcattgttcctagaaatatgataaggacagggcttccaatgatagatgtttttaatactcttgttgaatctcaaaaattgccaattttttctgtttctggtgagccttataatgagcttcttataagaattgcacttcaagcagaagttgatttaataattcttggcggaatgggacttaagcatgatgattatttaacttttaaagattctttagaaaagggaggtgctttaagtagagcaattttttttgttcatactgctaatgattctgttgttgaatctttaactgttcctgatatttcactttctgttgctgaaaagtttgctctaaagggcaaaaaagttttggtgcttctcacagacatgacaaattttgctgatgcaatgaaagaaatatctattacaatggaacaagtgccttctaatagaggttatcccggggatttgtattctcagcttgcatatcgttatgagaaggctattgactttgaaggcgcaggatcaattacaatacttgcagttacaacaatgccgggtgacgatgttactcatcctgttcctgacaatactggatacattacagaaggtcaatactatttaaaaggtggcagaatagagccttttgggtctctttcaagacttaagcaaatggtaaatagtagaactagagacgatcacaggactataatggattcaatgatcaagctttatgcatcttcaaaagagtctgtagaaaaaaaggctatgggatttaatatgactaagtgggatgaaaaattgctcaagtatagcaatatgtttgaaagtaagatgatggatttgtctgttaatattcctttagaagaggctttagatttaggttggagcattcttgctagttgttttagcccaaaagaaacgggaataaaaacagatcttattgaaaaatattggcctaaaaaagagacttattga

SEQ ID NO: 557 - protein, 324 aa, Borrelia burgdorferi
MRSAVLFFFALPFSISLYSSSNKNFPYWILLEKGRQFLYSKSEFSKSNLTHAINYLQEALLRKGVYPEASYYLSVAYGMSGNAILEKLNLYKSFEDRYYLLDESFEKKILFSLAKMAELENNYVDTIDYLNDILNKFSTKKDYYSYHDYSQGENSMSNNELNASFYLTSYLKQVRGAFGIDFTFNLYRFKNYNVIDTHQLLSKVYLHLKAYELSITHGLIAAVGILTRMYDYVCYYEPVYQFKNLRSFVQKINKYKAIKNAFESTDFWEIVYNVAAATYAYSNGNYKFRAIDTWKLVVDLAPRFSPYIAKSRSQIKNSVYLKKN

SEQ ID NO: 558 - protein, 304 aa, Borrelia burgdorferi
SNKNFPYWILLEKGRQFLYSKSEFSKSNLTHAINYLQEALLRKGVYPEASYYLSVAYGMSGNAILEKLNLYKSFEDRYYLLDESFEKKILFSLAKMAELENNYVDTIDYLNDILNKFSTKKDYYSYHDYSQGENSMSNNELNASFYLTSYLKQVRGAFGIDFTFNLYRFKNYNVIDTHQLLSKVYLHLKAYELSITHGLIAAVGILTRMYDYVCYYEPVYQFKNLRSFVQKINKYKAIKNAFESTDFWEIVYNVAAATYAYSNGNYKFRAIDTWKLVVDLAPRFSPYIAKSRSQIKNSVYLKKN

SEQ ID NO: 559 - DNA, 975 bp, Borrelia burgdorferi
atgagaagtgcggttttatttttttttgctttgcctttttctatttctttgtattcttcaagtaataaaaattttccgtattggattttacttgaaaaaggcaggcaatttctttattctaaatctgaatttagtaagtctaatcttacacatgctattaattatttgcaggaagctttgcttagaaaaggcgtttatcctgaggctagttattatttgtcagtagcttatggtatgtctggcaatgctattcttgaaaaattaaacctttataagtcttttgaagacagatattatttgctagatgaatcttttgaaaaaaaaatacttttttctttagctaaaatggctgaacttgagaataattatgttgatactattgattatttgaatgacatattaaataagttttcaactaaaaaagattattatagttatcatgattattctcaaggcgaaaacagtatgtcaaataatgaacttaatgcttcattttatttaacttcttatttaaaacaagtaagaggagcttttggtattgattttacttttaatctttacagatttaaaaactacaatgttattgatactcatcaattattgtcaaaagtttatttgcacttaaaagcttatgagctttcaattactcatggacttatagctgcagtaggaattttaacaagaatgtatgattatgtttgttattatgaacctgtgtatcagtttaaaaatttaaggtcttttgttcaaaaaattaataagtataaggcaataaaaaatgcttttgaatctacagatttttgggaaatagtttataatgttgctgctgctacttatgcatattctaatggcaattataaatttagagcaatagatacttggaaattagtagtagatcttgcgccaaggttttctccttatattgctaaatcaagaagtcaaattaaaaattctgtatatttaaaaaaaaattaa

SEQ ID NO: 560 - DNA, 915 bp, Borrelia burgdorferi
agtaataaaaattttccgtattggattttacttgaaaaaggcaggcaatttctttattctaaatctgaatttagtaagtctaatcttacacatgctattaattatttgcaggaagctttgcttagaaaaggcgtttatcctgaggctagttattatttgtcagtagcttatggtatgtctggcaatgctattcttgaaaaattaaacctttataagtcttttgaagacagatattatttgctagatgaatcttttgaaaaaaaaatacttttttctttagctaaaatggctgaacttgagaataattatgttgatactattgattatttgaatgacatattaaataagttttcaactaaaaaagattattatagttatcatgattattctcaaggcgaaaacagtatgtcaaataatgaacttaatgcttcattttatttaacttcttatttaaaacaagtaagaggagcttttggtattgattttacttttaatctttacagatttaaaaactacaatgttattgatactcatcaattattgtcaaaagtttatttgcacttaaaagcttatgagctttcaattactcatggacttatagctgcagtaggaattttaacaagaatgtatgattatgtttgttattatgaacctgtgtatcagtttaaaaatttaaggtcttttgttcaaaaaattaataagtataaggcaataaaaaatgcttttgaatctacagatttttgggaaatagtttataatgttgctgctgctacttatgcatattctaatggcaattataaatttagagcaatagatacttggaaattagtagtagatcttgcgccaaggttttctccttatattgctaaatcaagaagtcaaattaaaaattctgtatatttaaaaaaaaattaa

SEQ ID NO: 561 - protein, 316 aa, Borrelia burgdorferi
  SITE (179): Xaa equals any of the naturally occurring L-amino acids
MLKSNKVVLIGAGGVGSSFAYALTIDNSLVHELVIIDVNENKAKGEVMDLNHGQMFLKKNINVLFGTYKDCANADIVVITAGLNQKPGETRLDLVDKNSKIFKDIITNVVSSGFDGIFVVASNPVDIMTYVTMKYSKFPIHKVIGTGTILDTSRLRYFLSDHFNVNTQNIHSYIMGEHXDSSFATWDETKIAMKPLSEYLAEGKITELELDEIHKKVVNAAYEVIKLKGATYYAIGLGIKNIVNAIIGDQNVILPISSYINGQYGGLIKDIYIGAPAIVCKEGVKEVLNFKISPKELDKFNSSANQLKSYIDKMEF

SEQ ID NO: 562 - protein, 295 aa, Borrelia burgdorferi
  SITE (158): Xaa equals any of the naturally occurring L-amino acids
ALTIDNSLVHELVIIDVNENKAKGEVMDLNHGQMFLKKNINVLFGTYKDCANADIVVITAGLNQKPGETRLDLVDKNSKIFKDIITNVVSSGFDGIFVVASNPVDIMTYVTMKYSKFPIHKVIGTGTILDTSRLRYFLSDHFNVNTQNIHSYIMGEHXDSSFATWDETKIAMKPLSEYLAEGKITELELDEIHKKVVNAAYEVIKLKGATYYAIGLGIKNIVNAIIGDQNVILPISSYINGQYGGLIKDIYIGAPAIVCKEGVKEVLNFKISPKELDKFNSSANQLKSYIDKMEF

SEQ ID NO: 563 - DNA, 950 bp, Borrelia burgdorferi
atgcttaagtctaataaagttgttcttattggagctggtggggttggttcaagctttgcgtatgctttaacaatagacaattcacttgtacatgaacttgtaattattgatgttaatgaaaataaagcaaaaggggaggtcatggaccttaatcatggccaaatgtttttaaagaagaatattaatgtattgtttgggacttacaaagattgtgctaatgcagatattgttgtaattacagcaggacttaatcaaaagcctggtgagacaagacttgatttggttgataaaaattctaaaatttttaaagatattataactaatgttgtatctagcggttttgatggtatttttgttgttgcaagcaatcctgtagacattatgacttatgttacaatgaaatattccaaatttcctattcataaggttattggtactgggactattcttgatacttcaagacttagatattttttaagtgatcattttaatgtgaacactcaaaatatacattcatatattatgggtgagcacgtgacagttcttttgctacgtgggatgaaacaaaaatagcaatgaagcctttgtcagaatatcttgctgaaggcaaaataactgagttggagcttgatgaaattcataaaaaggttgtgaatgctgcttatgaagttattaagttaaagggggcaacctattatgctattggacttggtattaagaatattgtaaatgcaataattggagatcagaatgttattctgccaatatcttcttatattaatggccagtatgggggattgattaaagatatttatattggagcgcctgctatagtttgtaaggaaggagtcaaagaagttttaaactttaagataagccctaaagagcttgataagtttaatagttctgctaatcagcttaaaagctatattgataaaatggaattttag

SEQ ID NO: 564 - DNA, 887 bp, Borrelia burgdorferi
gctttaacaatagacaattcacttgtacatgaacttgtaattattgatgttaatgaaaataaagcaaaaggggaggtcatggaccttaatcatggccaaatgtttttaaagaagaatattaatgtattgtttgggacttacaaagattgtgctaatgcagatattgttgtaattacagcaggacttaatcaaaagcctggtgagacaagacttgatttggttgataaaaattctaaaatttttaaagatattataactaatgttgtatctagcggttttgatggtatttttgttgttgcaagcaatcctgtagacattatgacttatgttacaatgaaatattccaaatttcctattcataaggttattggtactgggactattcttgatacttcaagacttagatattttttaagtgatcattttaatgtgaacactcaaaatatacattcatatattatgggtgagcacgtgacagttcttttgctacgtgggatgaaacaaaaatagcaatgaagcctttgtcagaatatcttgctgaaggcaaaataactgagttggagcttgatgaaattcataaaaaggttgtgaatgctgcttatgaagttattaagttaaagggggcaacctattatgctattggacttggtattaagaatattgtaaatgcaataattggagatcagaatgttattctgccaatatcttcttatattaatggccagtatgggggattgattaaagatatttatattggagcgcctgctatagtttgtaaggaaggagtcaaagaagttttaaactttaagataagccctaaagagcttgataagtttaatagttctgctaatcagcttaaaagctatattgataaaatggaattttag

SEQ ID NO: 565 - protein, 342 aa, Borrelia burgdorferi
MKKKQLILLLFMPQIIYAKSYFASDVFFNKYQKLNEKPKTGFYIEYYSVDDTEKLYLYKENNLIKYKTIQIIENTKKITCYDTKDTKRKEEIYDNLNNKIQEIEYDSKGKTLETANYVYENENLISKNLKTINQKPKLIYYSKDDNGKLLKITGSNFQIWNYGINGDIKSTYFDIKKATTKVIKYDDKKRNSNSTIIVNNKIKSKEKNQYLDEEKIVNTFEEENTKIISTYKANNLIKEETYKNNELIKVNDFQYNESDMIIFQNTKEKDKDQYTNTKIEYEYNKDNQLKSKKIYENDIIYLKTEYHNDNEYEEEIYYNKKPALRVKHKNGKVTEEKPIGTN

SEQ ID NO: 566 - protein, 323 aa, Borrelia burgdorferi
SYFASDVFFNKYQKLNEKPKTGFYIEYYSVDDTEKLYLYKENNLIKYKTIQIIENTKKITCYDTKDTKRKEEIYDNLNNKIQEIEYDSKGKTLETANYVYENENLISKNLKTINQKPKLIYYSKDDNGKLLKITGSNFQIWNYGINGDIKSTYFDIKKATTKVIKYDDKKRNSNSTIIVNNKIKSKEKNQYLDEEKIVNTFEEENTKIISTYKANNLIKEETYKNNELIKVNDFQYNESDMIIFQNTKEKDKDQYTNTKIEYEYNKDNQLKSKKIYENDIIYLKTEYHNDNEYEEEIYYNKKPALRVKHKNGKVTEEKPIGTN

SEQ ID NO: 567 - DNA, 1029 bp, Borrelia burgdorferi
atgaaaaaaaaacaattaatacttcttctatttatgccacaaattatttatgcaaaaagctattttgcatctgatgtatttttcaataaataccaaaaattaaatgaaaaaccaaaaacggggttttatattgagtattattctgttgatgatactgaaaaactctacctatacaaagaaaataacttaataaaatacaaaacaattcaaatcatagaaaacacaaaaaaaattacatgttatgatacaaaagatacaaaaagaaaagaagagatttacgataatttaaataacaaaatacaagaaattgaatatgatagcaaaggaaaaactcttgaaacagcaaattacgtttatgaaaacgaaaacttaatatctaaaaatttaaaaacaataaaccaaaaaccaaaattaatatattattctaaagacgacaatggtaaattactaaaaataacaggatcaaatttccaaatttggaactatggaattaatggcgacataaaatctacatattttgacatcaaaaaagcaacaacaaaagttataaaatatgatgataaaaaaagaaattcaaacagtacaataattgttaataataaaataaaatccaaagaaaaaaaccaatatttagatgaagaaaaaatagtaaatacctttgaagaagagaatacaaaaatcatatctacctacaaggcaaacaacctaattaaagaagaaacatataaaaataatgaacttataaaagtaaatgattttcaatacaacgaatctgatatgataatttttcaaaacactaaagaaaaggataaagaccaatacaccaatactaaaattgaatacgaatataacaaagacaatcaattaaaaagcaaaaaaatttatgagaacgatataatttatctaaaaactgaataccacaatgacaatgaatatgaagaagaaatatactacaataaaaaacctgctcttagggtaaaacacaagaacggaaaagtcaccgaagaaaaaccaataggaacaaattaa

SEQ ID NO: 568 - DNA, 972 bp, Borrelia burgdorferi
agctattttgcatctgatgtatttttcaataaataccaaaaattaaatgaaaaaccaaaaacggggttttatattgagtattattctgttgatgatactgaaaaactctacctatacaaagaaaataacttaataaaatacaaaacaattcaaatcatagaaaacacaaaaaaaattacatgttatgatacaaaagatacaaaaagaaaagaagagatttacgataatttaaataacaaaatacaagaaattgaatatgatagcaaaggaaaaactcttgaaacagcaaattacgtttatgaaaacgaaaacttaatatctaaaaatttaaaaacaataaaccaaaaaccaaaattaatatattattctaaagacgacaatggtaaattactaaaaataacaggatcaaatttccaaatttggaactatggaattaatggcgacataaaatctacatattttgacatcaaaaaagcaacaacaaaagttataaaatatgatgataaaaaaagaaattcaaacagtacaataattgttaataataaaataaaatccaaagaaaaaaaccaatatttagatgaagaaaaaatagtaaatacctttgaagaagagaatacaaaaatcatatctacctacaaggcaaacaacctaattaaagaagaaacatataaaaataatgaacttataaaagtaaatgattttcaatacaacgaatctgatatgataatttttcaaaacactaaagaaaaggataaagaccaatacaccaatactaaaattgaatacgaatataacaaagacaatcaattaaaaagcaaaaaaatttatgagaacgatataatttatctaaaaactgaataccacaatgacaatgaatatgaagaagaaatatactacaataaaaaacctgctcttagggtaaaacacaagaacggaaaagtcaccgaagaaaaaccaataggaacaaattaa

SEQ ID NO: 569 - protein, 469 aa, Borrelia burgdorferi
MEKLKLKLAIPLLVFTICKIHSQSNIEYNFSYIINTKKENIDLKKGIEKQLDKIYDKITEHIVNNDDKSIIEDIYINQDIIKTELEISKLKKEMDKKKLQNIITAKEKHNTKTKIDELKKNIQNINNKQKKFAEYFNNLKKLKVKYKKIEEQTNISNLNKEFFIREELFFINYIDLKKIENYYLLEISNITPEKIETKKAVFKTSSSVNEIADHITKYSLKEILGREFLKININVKNNSDAKIYINEKFVSKGIYHDNIFDISKLPNKEIEIQITSANFENYSIKRTVKNADSIILDIDLKRTISKKVSIKSNVQSKVFKKGIFMGETPIEIEKPENQDIILLKSKGYKDKFKLINKEEDQVEIEMIKTNKNRLIDTRDKFYVNLAVFTLSTIGAIFAGTLLNNSEVLYKITGNHFINKRLTAEDVYMAKAEQMTATFLFGVGITLTIGSFISLITHLVEYIKEANMGE

SEQ ID NO: 570 - protein, 446 aa, Borrelia burgdorferi
SNIEYNFSYIINTKKENIDLKKGIEKQLDKIYDKITEHIVNNDDKSIIEDIYINQDIIKTELEISKLKKEMDKKKLQNIITAKEKHNTKTKIDELKKNIQNINNKQKKFAEYFNNLKKLKVKYKKIEEQTNISNLNKEFFIREELFFINYIDLKKIENYYLLEISNITPEKIETKKAVFKTSSSVNEIADHITKYSLKEILGREFLKININVKNNSDAKIYINEKFVSKGIYHDNIFDISKLPNKEIEIQITSANFENYSIKRTVKNADSIILDIDLKRTISKKVSIKSNVQSKVFKKGIFMGETPIEIEKPENQDIILLKSKGYKDKFKLINKEEDQVEIEMIKTNKNRLIDTRDKFYVNLAVFTLSTIGAIFAGTLLNNSEVLYKITGNHFINKRLTAEDVYMAKAEQMTATFLFGVGITLTIGSFISLITHLVEYIKEANMGE

SEQ ID NO: 571 - DNA, 1410 bp, Borrelia burgdorferi
atggaaaagcttaaactaaagctagcaataccattgctagtatttacaatatgcaaaatacattctcaaagtaatattgaatacaatttttcctatatcattaatacaaaaaaagaaaatattgacctaaaaaagggtattgaaaaacaattggacaaaatctatgataaaataacagaacatatagtaaacaatgatgacaagagcatcattgaagacatttatataaatcaagatataataaaaacagaacttgaaattagcaaattaaaaaaagaaatggataaaaaaaaacttcaaaacataataaccgcaaaagaaaagcataacaccaaaaccaaaattgatgagcttaaaaaaaatattcaaaatattaacaataaacaaaaaaaatttgcagaatattttaacaatttaaaaaaactaaaagtaaaatataaaaaaatcgaagagcaaacaaatatatcaaatttaaataaagaattttttataagagaagaattattttttattaactatattgatcttaaaaaaatagaaaattattatttgctagaaattagcaacatcactcctgagaaaattgagactaaaaaagcggtatttaaaacatcatcttctgttaatgaaattgcagatcacataacaaaatacagcctcaaagaaatattgggcagagaatttttaaaaatcaacattaacgtcaaaaataactcggatgcaaaaatctacataaatgaaaaatttgtttcaaaaggaatctatcacgataatatttttgacatttctaaactcccaaacaaagaaattgaaatacaaatcacaagtgcaaatttcgaaaactattctattaaaagaacggtaaaaaatgcagactcaataatattagatattgacttaaaaagaacaatctctaaaaaagtatcaattaaaagcaatgtacaatctaaagtttttaaaaaaggaatatttatgggagaaaccccaattgaaattgaaaaaccagaaaatcaagatatcatcttgcttaaatctaaaggatataaagataaattcaagttaataaataaagaagaagatcaagtagaaatagaaatgataaaaactaacaaaaatagacttatcgacacaagagataaattttatgtcaatctggccgtctttacattaagcacaataggagccatttttgcaggaacattgcttaacaattcagaagtactttataaaataacaggcaatcactttattaacaaaagattaacagcagaagatgtttatatggcaaaagcggaacaaatgactgcaacatttctatttggagtaggaatcactttaactattggaagctttatctcattaataactcatttagtagaatatattaaagaagcaaatatgggagaatag

SEQ ID NO: 572 - DNA, 1341 bp, Borrelia burgdorferi
agtaatattgaatacaatttttcctatatcattaatacaaaaaaagaaaatattgacctaaaaaagggtattgaaaaacaattggacaaaatctatgataaaataacagaacatatagtaaacaatgatgacaagagcatcattgaagacatttatataaatcaagatataataaaaacagaacttgaaattagcaaattaaaaaaagaaatggataaaaaaaaacttcaaaacataataaccgcaaaagaaaagcataacaccaaaaccaaaattgatgagcttaaaaaaaatattcaaaatattaacaataaacaaaaaaaatttgcagaatattttaacaatttaaaaaaactaaaagtaaaatataaaaaaatcgaagagcaaacaaatatatcaaatttaaataaagaattttttataagagaagaattattttttattaactatattgatcttaaaaaaatagaaaattattatttgctagaaattagcaacatcactcctgagaaaattgagactaaaaaagcggtatttaaaacatcatcttctgttaatgaaattgcagatcacataacaaaatacagcctcaaagaaatattgggcagagaatttttaaaaatcaacattaacgtcaaaaataactcggatgcaaaaatctacataaatgaaaaatttgtttcaaaaggaatctatcacgataatatttttgacatttctaaactcccaaacaaagaaattgaaatacaaatcacaagtgcaaatttcgaaaactattctattaaaagaacggtaaaaaatgcagactcaataatattagatattgacttaaaaagaacaatctctaaaaaagtatcaattaaaagcaatgtacaatctaaagtttttaaaaaaggaatatttatgggagaaaccccaattgaaattgaaaaaccagaaaatcaagatatcatcttgcttaaatctaaaggatataaagataaattcaagttaataaataaagaagaagatcaagtagaaatagaaatgataaaaactaacaaaaatagacttatcgacacaagagataaattttatgtcaatctggccgtctttacattaagcacaataggagccatttttgcaggaacattgcttaacaattcagaagtactttataaaataacaggcaatcactttattaacaaaagattaacagcagaagatgtttatatggcaaaagcggaacaaatgactgcaacatttctatttggagtaggaatcactttaactattggaagctttatctcattaataactcatttagtagaatatattaaagaagcaaatatgggagaatag

SEQ ID NO: 573 - protein, 490 aa, Borrelia burgdorferi
MVRFLGFLYLITTIPLIKSCDAAQFGDYKPLYFENENDLKTANEYINSLGYKTISEYTTKIDILDFPENKEITINEINKLNNLDLRKSIFLKKLSNLFNIEHKKLLYVENRFKSINFKNLKKELNINADIHSLDYKTKINFISSIIFLIIIILLIFLDPTNSIFTLIFLLISSLAFMISKEIMYFYPFTVLSYLLFLIISNFNKNYNKIYLKEINFLTLMTKIKHLLFLFTFTALYFITITTFFTTNIDPTFIAFVAIPTLCIFLIFSWIKTESNFKDTFLFPIEIKEKKIEGKKALKSKIAIHLLLFTLSLIPFAYSSYMLNSYENINYLYSKKLNYFDYLNPNNIYIMLGYNKDMPNIIGYLSHILYQNELKYNITAKYGKIPKDIKENYFEIKNDKIEIHPKTVYEVDKSFIDEILKKDLASLFLKNKNPILIYKENKNNINTDKKNYKILFFFSLPFFVLLFLFKAIRFTILLNINEKTYKKYIQG

SEQ ID NO: 574 - protein, 471 aa, Borrelia burgdorferi
CDAAQFGDYKPLYFENENDLKTANEYINSLGYKTISEYTTKIDILDFPENKEITINEINKLNNLDLRKSIFLKKLSNLFNIEHKKLLYVENRFKSINFKNLKKELNINADIHSLDYKTKINFISSIIFLIIIILLIFLDPTNSIFTLIFLLISSLAFMISKEIMYFYPFTVLSYLLFLIISNFNKNYNKIYLKEINFLTLMTKIKHLLFLFTFTALYFITITTFFTTNIDPTFIAFVAIPTLCIFLIFSWIKTESNFKDTFLFPIEIKEKKIEGKKALKSKIAIHLLLFTLSLIPFAYSSYMLNSYENINYLYSKKLNYFDYLNPNNIYIMLGYNKDMPNIIGYLSHILYQNELKYNITAKYGKIPKDIKENYFEIKNDKIEIHPKTVYEVDKSFIDEILKKDLASLFLKNKNPILIYKENKNNINTDKKNYKILFFFSLPFFVLLFLFKAIRFTILLNINEKTYKKYIQG

SEQ ID NO: 575 - DNA, 1473 bp, Borrelia burgdorferi
atggtgcgttttttaggttttttatatttaattacaacaataccacttatcaaatcctgtgatgcagctcaatttggagactacaaacctttatactttgaaaatgaaaatgatctaaaaactgccaatgaatatataaattcactaggatacaaaacaatctcagaatacacaacaaaaattgacattttagactttcccgaaaataaagaaatcacaataaatgagataaacaaacttaacaatcttgacctgagaaaaagcatatttttaaaaaagctctccaatcttttcaacatagagcacaaaaaacttctttatgttgaaaacaggtttaaaagtataaattttaaaaacctaaaaaaagaactcaatattaatgccgacatacattctcttgactacaaaacaaaaattaattttatttcaagcataatatttctaatcataataattttattaatttttttagacccaacaaactctatatttactttaatttttctattaatttcatctcttgcttttatgataagcaaagaaataatgtatttttatccatttacagttctctcttatttgttatttttaataatcagtaattttaacaaaaattacaataaaatatatttaaaagaaataaattttttaacactaatgacaaaaataaaacacttactatttttatttacattcacagctctatatttcattacaatcacaaccttttttactacaaatattgatcccacttttattgcatttgtcgcaataccaaccctttgcattttcttaattttcagctggataaaaacagaaagcaattttaaagacactttcttattcccaatcgagattaaagagaaaaaaatagaaggaaaaaaagctttaaaatcaaaaatagcaatacatctactactatttacactctcattaattcctttcgcttattcaagctatatgctaaattcttatgaaaacattaactacctttacagtaaaaaattaaattactttgattatttaaatcctaataacatttatataatgctgggatacaacaaagacatgcccaatattatagggtacctatcccacattctttatcaaaacgaactaaaatacaatattaccgctaagtatggaaaaattcctaaagatataaaagaaaattactttgaaatcaaaaacgacaaaatagaaattcatcctaaaactgtttacgaagtagacaaatcatttattgatgaaattcttaaaaaagatcttgcaagtctgtttttaaaaaataaaaatccaatcctaatatataaagaaaacaagaataatatcaacacagataaaaaaaattacaaaatacttttctttttctctttgcccttctttgtattactattcctatttaaagcaataagatttacaattcttttaaacataaatgaaaaaacctataaaaaatatattcaaggataa

SEQ ID NO: 576 - DNA, 1416 bp, Borrelia burgdorferi
tgtgatgcagctcaatttggagactacaaacctttatactttgaaaatgaaaatgatctaaaaactgccaatgaatatataaattcactaggatacaaaacaatctcagaatacacaacaaaaattgacattttagactttcccgaaaataaagaaatcacaataaatgagataaacaaacttaacaatcttgacctgagaaaaagcatatttttaaaaaagctctccaatcttttcaacatagagcacaaaaaacttctttatgttgaaaacaggtttaaaagtataaattttaaaaacctaaaaaaagaactcaatattaatgccgacatacattctcttgactacaaaacaaaaattaattttatttcaagcataatatttctaatcataataattttattaatttttttagacccaacaaactctatatttactttaatttttctattaatttcatctcttgcttttatgataagcaaagaaataatgtatttttatccatttacagttctctcttatttgttatttttaataatcagtaattttaacaaaaattacaataaaatatatttaaaagaaataaattttttaacactaatgacaaaaataaaacacttactatttttatttacattcacagctctatatttcattacaatcacaaccttttttactacaaatattgatcccacttttattgcatttgtcgcaataccaaccctttgcattttcttaattttcagctggataaaaacagaaagcaattttaaagacactttcttattcccaatcgagattaaagagaaaaaaatagaaggaaaaaaagctttaaaatcaaaaatagcaatacatctactactatttacactctcattaattcctttcgcttattcaagctatatgctaaattcttatgaaaacattaactacctttacagtaaaaaattaaattactttgattatttaaatcctaataacatttatataatgctgggatacaacaaagacatgcccaatattatagggtacctatcccacattctttatcaaaacgaactaaaatacaatattaccgctaagtatggaaaaattcctaaagatataaaagaaaattactttgaaatcaaaaacgacaaaatagaaattcatcctaaaactgtttacgaagtagacaaatcatttattgatgaaattcttaaaaaagatcttgcaagtctgtttttaaaaaataaaaatccaatcctaatatataaagaaaacaagaataatatcaacacagataaaaaaaattacaaaatacttttctttttctctttgcccttctttgtattactattcctatttaaagcaataagatttacaattcttttaaacataaatgaaaaaacctataaaaaatatattcaaggataa

SEQ ID NO: 577 - protein, 153 aa, Borrelia burgdorferi
MIRALLTNDLFLSCLVSGISAQVIKYGIQTVKTRKLKLTPVHLLKKIFLETGGMPSSHSSTVTALSTSIALTEGIDTNFIIALAFALITIRDSFGVRYMSGVQAEYLNALSEKLKKEIKIDTTKIKVVKGHKKKEVLTGIIIGIVSAYIVCYF

SEQ ID NO: 578 - protein, 133 aa, Borrelia burgdorferi
AQVIKYGIQTVKTRKLKLTPVHLLKKIFLETGGMPSSHSSTVTALSTSIALTEGIDTNFIIALAFALITIRDSFGVRYMSGVQAEYLNALSEKLKKEIKIDTTKIKVVKGHKKKEVLTGIIIGIVSAYIVCYF

SEQ ID NO: 579 - DNA, 462 bp, Borrelia burgdorferi
atgataagggcattgcttaccaatgatctttttttgtcttgtcttgtatcaggaatttctgctcaagtgattaaatatggtatccaaactgtaaaaacaagaaagttaaaactaactccagtacatcttttaaaaaaaatttttctagaaacaggaggcatgccaagtagtcattcatcaacggtcaccgctctttcaacctcaatcgcactaactgaaggaatagatacaaattttataatagctcttgcatttgcccttattacaataagagattctttcggcgtaagatatatgtctggagttcaagcagaatatttaaatgcattatcagaaaaattaaaaaaagaaataaaaattgacacaacaaaaataaaagtggtcaaggggcacaaaaagaaagaggttctaacgggcataataataggaatagtctctgcgtatattgtgtgctatttttag

SEQ ID NO: 580 - DNA, 402 bp, Borrelia burgdorferi
gctcaagtgattaaatatggtatccaaactgtaaaaacaagaaagttaaaactaactccagtacatcttttaaaaaaaatttttctagaaacaggaggcatgccaagtagtcattcatcaacggtcaccgctctttcaacctcaatcgcactaactgaaggaatagatacaaattttataatagctcttgcatttgcccttattacaataagagattctttcggcgtaagatatatgtctggagttcaagcagaatatttaaatgcattatcagaaaaattaaaaaaagaaataaaaattgacacaacaaaaataaaagtggtcaaggggcacaaaaagaaagaggttctaacgggcataataataggaatagtctctgcgtatattgtgtgctatttttag

SEQ ID NO: 581 - protein, 107 aa, Borrelia burgdorferi
MYIGAAGKSFSIIIDSAFLSNCFLFIGSFSRSDSLMSLSNSRFEYPYDASCEFSLVNIVKYVCGSKYSPMRPTLIISKLPVFLLLVRTGQFSLVSIRLIFRIFFHWF

SEQ ID NO: 582 - protein, 86 aa, Borrelia burgdorferi
CFLFIGSFSRSDSLMSLSNSRFEYPYDASCEFSLVNIVKYVCGSKYSPMRPTLIISKLPVFLLLVRTGQFSLVSIRLIFRIFFHWF

SEQ ID NO: 583 - DNA, 324 bp, Borrelia burgdorferi
atgtatattggtgcagcaggaaaatctttttcaattattattgattctgcttttctgagtaattgttttctttttataggatctttttcaagatctgattctctgatgagtttgtcaaattctaggtttgaatatccgtatgatgcaagttgtgaattttctcttgtgaatatagtaaagtatgtgtgtggatctaaatattccccaatgcgtccaactcttattatttcaaaattgccagtatttctgctgttggtaagaacaggccaattttcgttggtaagcataagattgatatttagaatttttttccattggttttga

SEQ ID NO: 584 - DNA, 261 bp, Borrelia burgdorferi
tgttttctttttataggatctttttcaagatctgattctctgatgagtttgtcaaattctaggtttgaatatccgtatgatgcaagttgtgaattttctcttgtgaatatagtaaagtatgtgtgtggatctaaatattccccaatgcgtccaactcttattatttcaaaattgccagtatttctgctgttggtaagaacaggccaattttcgttggtaagcataagattgatatttagaatttttttccattggttttga

SEQ ID NO: 585 - protein, 528 aa, Borrelia burgdorferi
MKLQRSLFLIIFFLTFLCCNNKERKEGVSFKISLGAEPSSLDPQLAEDNVASKMIDTMFRGIVTGDPNTGGNKPGLAKGWDISSDGTVYTFNLREKITWSDGVAITAEGIRKSYLRILNKETGSKYVEMVKSVIKNGQKYFDGQVTDSELGIRAIDEKTLEITLESPKPYFIDMLVHQSFIPVPVHVTEKYGQNWTSPENMVTSGPFKLKERIPNEKYVFEKNNKYYDSNEVELEEITFYTTNDSSTAYKMYENEELDAIFGSIPPDLIKNLKLRSDYYSSAVNAIYFYAFNTHIKPLDNVKIRKALTLAIDRETLTYKVLDNGTTPTRRATPNFSSYSYAKSLELFNPEIAKTLLAEAGYPNGNGFPILKLKYNTNEANKKICEFIQNQWKKNLNIDVELENEEWTTYLNTKANGNYEIARAGWIGDYADPLTFLSIFTQGYTQFSSHNYSNPEYNELIKKSDLELDPIKRQDILRQAEEIIIEKDFPIAPIYIYGNSYLFRNDKWTGWNTNILERFDLSQLKLKNK

SEQ ID NO: 586 - protein, 511 aa, Borrelia burgdorferi
CCNNKERKEGVSFKISLGAEPSSLDPQLAEDNVASKMIDTMFRGIVTGDPNTGGNKPGLAKGWDISSDGTVYTFNLREKITWSDGVAITAEGIRKSYLRILNKETGSKYVEMVKSVIKNGQKYFDGQVTDSELGIRAIDEKTLEITLESPKPYFIDMLVHQSFIPVPVHVTEKYGQNWTSPENMVTSGPFKLKERIPNEKYVFEKNNKYYDSNEVELEEITFYTTNDSSTAYKMYENEELDAIFGSIPPDLIKNLKLRSDYYSSAVNAIYFYAFNTHIKPLDNVKIRKALTLAIDRETLTYKVLDNGTTPTRRATPNFSSYSYAKSLELFNPEIAKTLLAEAGYPNGNGFPILKLKYNTNEANKKICEFIQNQWKKNLNIDVELENEEWTTYLNTKANGNYEIARAGWIGDYADPLTFLSIFTQGYTQFSSHNYSNPEYNELIKKSDLELDPIKRQDILRQAEEIIIEKDFPIAPIYIYGNSYLFRNDKWTGWNTNILERFDLSQLKLKNK

SEQ ID NO: 587 - DNA, 1587 bp, Borrelia burgdorferi
atgaaattacaaaggtcattatttttaataatattttttctaacttttctttgttgtaataacaaggaaagaaaagaaggagtatcatttaaaataagcttgggagcagagccaagcagtcttgaccctcaattagcagaggataatgtcgcatcaaaaatgattgacacaatgtttagagggattgttacaggagatcctaatacagggggaaataaaccgggacttgcaaaagggtgggatatttcttctgatggaacagtttacacatttaacctaagagaaaaaatcacttggagtgacggagttgcaatcactgcagaaggaattagaaaatcttatcttagaattttaaataaagaaactggctcaaagtacgttgaaatggttaaatcggtaattaaaaatggtcaaaaatattttgatggacaagtgactgactctgaacttggaattagagcgattgatgaaaaaacattagaaataacactggaatcaccaaaaccttattttattgatatgttagtacaccaatcatttattccagtaccagttcatgttaccgaaaagtatggacaaaactggacaagccccgaaaacatggtgacaagtggtccttttaaattaaaagaaagaattcctaacgaaaaatatgtctttgaaaaaaataacaaatactacgactcaaatgaagtagaattagaagagattacattttacacaacaaatgacagctcaacagcgtataaaatgtatgaaaatgaagagctagatgcaatttttggttccatacccccagatctaatcaaaaatctaaaattaagaagcgactattactcatcagctgttaatgccatatacttttacgcgttcaatacacacatcaaaccacttgacaacgttaaaattagaaaagccttaactcttgctattgacagagaaacgcttacatataaagttcttgacaacgggactacccctacaagaagagcaactcccaactttagttcatattcttatgcaaaaagtttagaattatttaatcctgaaattgcaaaaacccttctagctgaagctggatatcctaatggcaatggatttccaattttaaaattaaaatacaatacaaacgaagcaaataaaaaaatttgtgaatttattcaaaaccaatggaaaaaaaatttaaatattgatgtggaacttgaaaacgaagaatggacaacatacttaaacactaaggcaaatggaaattatgaaatagcaagagcaggatggataggcgattatgctgatcctttgacatttttaagcatattcacacaaggatacacacaattctcatctcataattactcaaacccagaatacaacgaacttataaagaaatccgaccttgagcttgatccaataaaaagacaagacattttaagacaagcagaagagataattattgaaaaagattttccaatagcaccaatatacatatatgggaacagttaccttttcagaaatgacaaatggacagggtggaacaccaatattttagaaagatttgatttatctcagctaaaattaaaaaataaataa

SEQ ID NO: 588 - DNA, 1536 bp, Borrelia burgdorferi
tgttgtaataacaaggaaagaaaagaaggagtatcatttaaaataagcttgggagcagagccaagcagtcttgaccctcaattagcagaggataatgtcgcatcaaaaatgattgacacaatgtttagagggattgttacaggagatcctaatacagggggaaataaaccgggacttgcaaaagggtgggatatttcttctgatggaacagtttacacatttaacctaagagaaaaaatcacttggagtgacggagttgcaatcactgcagaaggaattagaaaatcttatcttagaattttaaataaagaaactggctcaaagtacgttgaaatggttaaatcggtaattaaaaatggtcaaaaatattttgatggacaagtgactgactctgaacttggaattagagcgattgatgaaaaaacattagaaataacactggaatcaccaaaaccttattttattgatatgttagtacaccaatcatttattccagtaccagttcatgttaccgaaaagtatggacaaaactggacaagccccgaaaacatggtgacaagtggtccttttaaattaaaagaaagaattcctaacgaaaaatatgtctttgaaaaaaataacaaatactacgactcaaatgaagtagaattagaagagattacattttacacaacaaatgacagctcaacagcgtataaaatgtatgaaaatgaagagctagatgcaatttttggttccatacccccagatctaatcaaaaatctaaaattaagaagcgactattactcatcagctgttaatgccatatacttttacgcgttcaatacacacatcaaaccacttgacaacgttaaaattagaaaagccttaactcttgctattgacagagaaacgcttacatataaagttcttgacaacgggactacccctacaagaagagcaactcccaactttagttcatattcttatgcaaaaagtttagaattatttaatcctgaaattgcaaaaacccttctagctgaagctggatatcctaatggcaatggatttccaattttaaaattaaaatacaatacaaacgaagcaaataaaaaaatttgtgaatttattcaaaaccaatggaaaaaaaatttaaatattgatgtggaacttgaaaacgaagaatggacaacatacttaaacactaaggcaaatggaaattatgaaatagcaagagcaggatggataggcgattatgctgatcctttgacatttttaagcatattcacacaaggatacacacaattctcatctcataattactcaaacccagaatacaacgaacttataaagaaatccgaccttgagcttgatccaataaaaagacaagacattttaagacaagcagaagagataattattgaaaaagattttccaatagcaccaatatacatatatgggaacagttaccttttcagaaatgacaaatggacagggtggaacaccaatattttagaaagatttgatttatctcagctaaaattaaaaaataaataa

SEQ ID NO: 589 - protein, 717 aa, Borrelia burgdorferi
MFNRSSCVLQNFLFLFLFLSLVSCFAKKEISGNNFIKAHSKEFDLNNLNWLWNFDYTKKNFDKHFNIDPSSYIYVAYLFKKIGFEEKFVEYMKKAIANGDSIASQFAGIKLIEYFNSAKEYFASELIGEKLYKKYENNKFIILGYFKSLYWQKKNDKALSLLNKLDKMKFSDYQENENILLKAVLYLNLSNVSESKIYFNELFENLPANYLHVRAYDYFIIENKSRYFGANFLNLVRFKYEVANGNFNGAINILNKNGLNDYYDNNIVLSDVYKAFISSGKVSNALTFFSKIKSKYKNYYLGILNLREKNNLGLLLLKEYLEGLDLNNEINRLDLLNTAFSNLIFTKSARDYFAESLPKFYTEGDKKNSTFIKILEEYILESIQLEDYGNLYKLYSNAQKVISNSVLSKLAFINARLIYHKLIKPNVSGEYKSLLHSAVNYDKWSYSSFMSRYLLDQNIDEFFTGGSDIKYEQSDYEIFLEGFLKFNLCNYVRGFISEDFRNGYKFSLDFYRKVYDELLKSENYYDATLVINYLVNQDESALMENDYKRLYPYLYGSLIEYWAKRRGLEASVVFSLIKAESSFEKNAVSKPGAVGLMQVMPSTANDISKELKYFNYDLKIPKDNIIIGTYYLKKRISTTGSLYKALASYNGGIGNVRKWEKSYGHLSKELFIEAIPFSQTRNYIKKILVYSVFYDALYEKKGIDSVIVKIMGEFPKN

SEQ ID NO: 590 - protein, 694 aa, Borrelia burgdorferi
CFAKKEISGNNFIKAHSKEFDLNNLNWLWNFDYTKKNFDKHFNIDPSSYIYVAYLFKKIGFEEKFVEYMKKAIANGDSIASQFAGIKLIEYFNSAKEYFASELIGEKLYKKYENNKFIILGYFKSLYWQKKNDKALSLLNKLDKMKFSDYQENENILLKAVLYLNLSNVSESKIYFNELFENLPANYLHVRAYDYFIIENKSRYFGANFLNLVRFKYEVANGNFNGAINILNKNGLNDYYDNNIVLSDVYKAFISSGKVSNALTFFSKIKSKYKNYYLGILNLREKNNLGLLLLKEYLEGLDLNNEINRLDLLNTAFSNLIFTKSARDYFAESLPKFYTEGDKKNSTFIKILEEYILESIQLEDYGNLYKLYSNAQKVISNSVLSKLAFINARLIYHKLIKPNVSGEYKSLLHSAVNYDKWSYSSFMSRYLLDQNIDEFFTGGSDIKYEQSDYEIFLEGFLKFNLCNYVRGFISEDFRNGYKFSLDFYRKVYDELLKSENYYDATLVINYLVNQDESALMENDYKRLYPYLYGSLIEYWAKRRGLEASVVFSLIKAESSFEKNAVSKPGAVGLMQVMPSTANDISKELKYFNYDLKIPKDNIIIGTYYLKKRISTTGSLYKALASYNGGIGNVRKWEKSYGHLSKELFIEAIPFSQTRNYIKKILVYSVFYDALYEKKGIDSVIVKIMGEFPKN

SEQ ID NO: 591 - DNA, 2154 bp, Borrelia burgdorferi
atgtttaatagaagttcttgtgtattacaaaattttctttttctttttttatttttaagtttagtttcttgctttgcaaaaaaagaaatctcaggcaataattttattaaggcgcattcaaaagagtttgatttaaataatttaaattggttatggaattttgattatacaaaaaaaaattttgataagcattttaacatagatccaagttcttacatatatgttgcttatttatttaaaaaaataggatttgaagagaaatttgtagagtatatgaaaaaggccatagctaatggagatagcattgcatcccagtttgctgggattaagcttattgaatattttaactcagcaaaagagtattttgcatctgaattgattggagagaagctttataaaaaatacgaaaataataaatttattatactggggtactttaaaagtctttattggcaaaagaaaaacgataaggcacttagtcttttaaataagcttgataagatgaaattttctgattatcaggaaaatgaaaatattttattaaaagcagttctttaccttaatctttctaatgtaagtgagtcaaaaatttattttaatgagctttttgagaacttacctgcaaattatttacatgtaagagcttatgattattttattattgaaaataagtctaggtattttggtgcaaattttttaaatcttgttagatttaagtatgaagtggcaaatggcaattttaatggtgcaataaatatattaaataaaaatggtttaaatgattattatgacaataacattgtattaagtgatgtttataaggcttttattagttctggcaaagtttcaaatgctttaacattttttagtaaaataaagagcaaatataaaaattattatttaggtattctaaaccttagagagaaaaataatttaggacttcttcttttaaaagaatatcttgaaggtttagatcttaacaatgagattaacaggcttgatttgcttaatactgcttttagcaatttaatttttactaagagcgcaagggattattttgccgaaagtttacccaagttttataccgagggcgataaaaaaaattctacttttattaagattttagaagagtatattttggaatcaattcagcttgaagactatggcaatctttataagctttattctaatgctcaaaaagttatttctaattctgttttgtctaagcttgcttttattaatgcaaggcttatatatcataaattaattaaacctaacgtaagcggagaatacaagagtcttttgcattctgctgttaattatgataaatggtcttattcttcatttatgagtaggtacttattagatcaaaatattgatgaattttttacaggtgggtctgatattaagtatgagcaatccgattatgagatttttttggaagggtttttaaaattcaatctttgtaattatgttagagggtttatttctgaggattttaggaatggatataaattttcacttgatttttatcgaaaagtatacgatgaacttttaaagagtgaaaattattacgatgcaactcttgtgattaattatcttgtaaatcaagatgaatctgctttaatggagaatgactataaaagactttatccttatttgtatggatctttgatagaatattgggctaaaaggagagggcttgaagctagtgttgtattttctttaataaaagcagagagtagctttgaaaaaaatgctgtctcaaaaccgggtgctgttggccttatgcaggttatgccatcaacagcaaatgatatttctaaagaacttaagtattttaactatgatttaaagattccaaaagataatataataattggaacatattatttaaaaaaaagaatatctacaactggcagtctttataaggctcttgcgtcttataatgggggtattggtaatgttagaaagtgggagaaaagttatggacatttgtcaaaagagctttttattgaggcaattccctttagtcaaactaggaattatattaaaaaaatattagtttattcggtattttatgatgctttgtatgaaaagaagggaatagattcagtaatagttaaaattatgggcgaattccccaaaaattaa

SEQ ID NO: 592 - DNA, 2085 bp, Borrelia burgdorferi
tgctttgcaaaaaaagaaatctcaggcaataattttattaaggcgcattcaaaagagtttgatttaaataatttaaattggttatggaattttgattatacaaaaaaaaattttgataagcattttaacatagatccaagttcttacatatatgttgcttatttatttaaaaaaataggatttgaagagaaatttgtagagtatatgaaaaaggccatagctaatggagatagcattgcatcccagtttgctgggattaagcttattgaatattttaactcagcaaaagagtattttgcatctgaattgattggagagaagctttataaaaaatacgaaaataataaatttattatactggggtactttaaaagtctttattggcaaaagaaaaacgataaggcacttagtcttttaaataagcttgataagatgaaattttctgattatcaggaaaatgaaaatattttattaaaagcagttctttaccttaatctttctaatgtaagtgagtcaaaaatttattttaatgagctttttgagaacttacctgcaaattatttacatgtaagagcttatgattattttattattgaaaataagtctaggtattttggtgcaaattttttaaatcttgttagatttaagtatgaagtggcaaatggcaattttaatggtgcaataaatatattaaataaaaatggtttaaatgattattatgacaataacattgtattaagtgatgtttataaggcttttattagttctggcaaagtttcaaatgctttaacattttttagtaaaataaagagcaaatataaaaattattatttaggtattctaaaccttagagagaaaaataatttaggacttcttcttttaaaagaatatcttgaaggtttagatcttaacaatgagattaacaggcttgatttgcttaatactgcttttagcaatttaatttttactaagagcgcaagggattattttgccgaaagtttacccaagttttataccgagggcgataaaaaaaattctacttttattaagattttagaagagtatattttggaatcaattcagcttgaagactatggcaatctttataagctttattctaatgctcaaaaagttatttctaattctgttttgtctaagcttgcttttattaatgcaaggcttatatatcataaattaattaaacctaacgtaagcggagaatacaagagtcttttgcattctgctgttaattatgataaatggtcttattcttcatttatgagtaggtacttattagatcaaaatattgatgaattttttacaggtgggtctgatattaagtatgagcaatccgattatgagatttttttggaagggtttttaaaattcaatctttgtaattatgttagagggtttatttctgaggattttaggaatggatataaattttcacttgatttttatcgaaaagtatacgatgaacttttaaagagtgaaaattattacgatgcaactcttgtgattaattatcttgtaaatcaagatgaatctgctttaatggagaatgactataaaagactttatccttatttgtatggatctttgatagaatattgggctaaaaggagagggcttgaagctagtgttgtattttctttaataaaagcagagagtagctttgaaaaaaatgctgtctcaaaaccgggtgctgttggccttatgcaggttatgccatcaacagcaaatgatatttctaaagaacttaagtattttaactatgatttaaagattccaaaagataatataataattggaacatattatttaaaaaaaagaatatctacaactggcagtctttataaggctcttgcgtcttataatgggggtattggtaatgttagaaagtgggagaaaagttatggacatttgtcaaaagagctttttattgaggcaattccctttagtcaaactaggaattatattaaaaaaatattagtttattcggtattttatgatgctttgtatgaaaagaagggaatagattcagtaatagttaaaattatgggcgaattccccaaaaattaa

SEQ ID NO: 593 - DNA, 912 bp, Borrelia burgdorferi
taaaaggagaatatttttatgagaaaaagtttgtttttatatgcattattaatgggaggattgatgtcttgtaatctagattccaaattatctagtaacaaagaacaaaaaaataacaataatgtaaaagaagtttcggatagtgttcaagaagatggtcttaatgatttatataataatcaagaaaagcaaaaaagctttactaaaaattttggagaacggaaatatgaggatttaattaatcctatagagcctataataccttcagaatcaccaaagaataaggctaatataccaaatatttcaattgcgcatactgaaaaaaaagagacaaaaaaggagaatttaatcccttctactaatgaagaaaaggaagctgatgcagcaattaaatatttagaagaaaatattcttaaaaactctaaattttctgaattaattagagaagtacgtgtaattaaagatgaatatgctttaataaaagctgatttgtatgatgtaattggaaagattaacaataaaaaaacatcattaatggagaatcctaagaacaatagagataagataaataaattaacacaattgttgcaaaataatttaaagatagatagtgaacttgagcagcttataaatatgattgatatggcagaaaatgaaataagctctgcggctttcttttttgacaacgctcagaaaaggttaaaagaaagcattattaaaagattagagagtaaaaataatagatcttatgcattaaaattgtctagacaggctttaagtgacgcaagaagtgctttaagtaatttagaatcttttgcctctaaaagaattgaaccaatggtgagaaaggaagaaataaaagagcttattaaacatgcaaaaactgttttagaaagtctcaataaaaaataa

SEQ ID NO: 594 - DNA, 841 bp, Borrelia burgdorferi
ttgtaatctagattccaaattatctagtaacaaagaacaaaaaaataacaataatgtaaaagaagtttcggatagtgttcaagaagatggtcttaatgatttatataataatcaagaaaagcaaaaaagctttactaaaaattttggagaacggaaatatgaggatttaattaatcctatagagcctataataccttcagaatcaccaaagaataaggctaatataccaaatatttcaattgcgcatactgaaaaaaaagagacaaaaaaggagaatttaatcccttctactaatgaagaaaaggaagctgatgcagcaattaaatatttagaagaaaatattcttaaaaactctaaattttctgaattaattagagaagtacgtgtaattaaagatgaatatgctttaataaaagctgatttgtatgatgtaattggaaagattaacaataaaaaaacatcattaatggagaatcctaagaacaatagagataagataaataaattaacacaattgttgcaaaataatttaaagatagatagtgaacttgagcagcttataaatatgattgatatggcagaaaatgaaataagctctgcggctttcttttttgacaacgctcagaaaaggttaaaagaaagcattattaaaagattagagagtaaaaataatagatcttatgcattaaaattgtctagacaggctttaagtgacgcaagaagtgctttaagtaatttagaatcttttgcctctaaaagaattgaaccaatggtgagaaaggaagaaataaaagagcttattaaacatgcaaaaactgttttagaaagtctcaataaaaaa

SEQ ID NO: 595 - protein, 302 aa, Borrelia burgdorferi
KENIFMRKSLFLYALLMGGLMSCNLDSKLSSNKEQKNNNNVKEVSDSVQEDGLNDLYNNQEKQKSFTKNFGERKYEDLINPIEPIIPSESPKNKANIPNISIAHTEKKETKKENLIPSTNEEKEADAAIKYLEENILKNSKFSELIREVRVIKDEYALIKADLYDVIGKINNKKTSLMENPKNNRDKINKLTQLLQNNLKIDSELEQLINMIDMAENEISSAAFFFDNAQKRLKESIIKRLESKNNRSYALKLSRQALSDARSALSNLESFASKRIEPMVRKEEIKELIKHAKTVLESLNKK

SEQ ID NO: 596 - protein, 280 aa, Borrelia burgdorferi
CNLDSKLSSNKEQKNNNNVKEVSDSVQEDGLNDLYNNQEKQKSFTKNFGERKYEDLINPIEPIIPSESPKNKANIPNISIAHTEKKETKKENLIPSTNEEKEADAAIKYLEENILKNSKFSELIREVRVIKDEYALIKADLYDVIGKINNKKTSLMENPKNNRDKINKLTQLLQNNLKIDSELEQLINMIDMAENEISSAAFFFDNAQKRLKESIIKRLESKNNRSYALKLSRQALSDARSALSNLESFASKRIEPMVRKEEIKELIKHAKTVLESLNKK

SEQ ID NO: 597 - DNA, 714 bp, Borrelia burgdorferi
taaaggagtttacaaatgagtaaactaatattggcaatatctatactgctaataatttcatgtaaatggtatgtagacaataccattgatgaagcaactgtagaaagtaaatcagcactaacatctattgatcaagtattagatgagataagtgaagccacaggcctaagttcggaaaaaatcacaaaattaactccggaagagctagaaaatttagcaaaggaagctcaagatgactctgaaaaatccaaaaaagaaattgaagatcaaaaaaataccaaggaaagtaaaaacatagaagtaaaggatactcctcgcttaatcaaattgataaagaattcatcagaaaaaattgattcggtttttcaaacactaattaatataggttataatgctacctatgcagccaaaagtaatttgaagaatggactaaagatggtgaaattactggatgagttgctaaaaatatcggtaagtagcaatggtgataaaagtacccaaaaatacaatgaacttaaaaccgttgtaaataagtttaatgctgaaaattcggtaagcgtttcttttaaagaacattcaaacagtaaaattgaaactaaaaaatgtattcaaactcttatgaaaaatgtagaaacatactttgaaggtgtatgcagcgaacttaaaaacaaaaatgatggtgagtacgaaaaaacattgacaactttaagctaa

SEQ ID NO: 598 - DNA, 634 bp, Borrelia burgdorferi
atgtaaatggtatgtagacaataccattgatgaagcaactgtagaaagtaaatcagcactaacatctattgatcaagtattagatgagataagtgaagccacaggcctaagttcggaaaaaatcacaaaattaactccggaagagctagaaaatttagcaaaggaagctcaagatgactctgaaaaatccaaaaaagaaattgaagatcaaaaaaataccaaggaaagtaaaaacatagaagtaaaggatactcctcgcttaatcaaattgataaagaattcatcagaaaaaattgattcggtttttcaaacactaattaatataggttataatgctacctatgcagccaaaagtaatttgaagaatggactaaagatggtgaaattactggatgagttgctaaaaatatcggtaagtagcaatggtgataaaagtacccaaaaatacaatgaacttaaaaccgttgtaaataagtttaatgctgaaaattcggtaagcgtttcttttaaagaacattcaaacagtaaaattgaaactaaaaaatgtattcaaactcttatgaaaaatgtagaaacatactttgaaggtgtatgcagcgaacttaaaaacaaaaatgatggtgagtacgaaaaa

SEQ ID NO: 599 - protein, 236 aa, Borrelia burgdorferi
RSLQMSKLILAISILLIISCKWYVDNTIDEATVESKSALTSIDQVLDEISEATGLSSEKITKLTPEELENLAKEAQDDSEKSKKEIEDQKNTKESKNIEVKDTPRLIKLIKNSSEKIDSVFQTLINIGYNATYAAKSNLKNGLKMVKLLDELLKISVSSNGDKSTQKYNELKTVVNKFNAENSVSVSFKEHSNSKIETKKCIQTLMKNVETYFEGVCSELKNKNDGEYEKTLTTLS

SEQ ID NO: 600 - protein, 211 aa, Borrelia burgdorferi
CKWYVDNTIDEATVESKSALTSIDQVLDEISEATGLSSEKITKLTPEELENLAKEAQDDSEKSKKEIEDQKNTKESKNIEVKDTPRLIKLIKNSSEKIDSVFQTLINIGYNATYAAKSNLKNGLKMVKLLDELLKISVSSNGDKSTQKYNELKTVVNKFNAENSVSVSFKEHSNSKIETKKCIQTLMKNVETYFEGVCSELKNKNDGEYEK

SEQ ID NO: 601 - DNA, 384 bp, Borrelia burgdorferi
tgaatctctaaagattttagcaggggagaaaatatgaaaaaaagttttttatcaatatacatgttaatttcaataagtttattatcatgtgatgttagtagattaaatcagagaaatattaatgagcttaaaatttttgttgaaaaggccaagtattattctataaaattagacgctatttataacgaatgtacaggagcatataatgatattatgacttattcggaaggtacattttctgatcaaagtaaggttaatcaagctatatctatatttaaaaaagacaataaaattgttaataagtttaaggagcttgaaaagattatagaagaatacaaacctatgtttttaagtaaattaattgatgattttgcgggatccgtt

SEQ ID NO: 602 - DNA, 286 bp, Borrelia burgdorferi
atgtgatgttagtagattaaatcagagaaatattaatgagcttaaaatttttgttgaaaaggccaagtattattctataaaattagacgctatttataacgaatgtacaggagcatataatgatattatgacttattcggaaggtacattttctgatcaaagtaaggttaatcaagctatatctatatttaaaaaagacaataaaattgttaataagtttaaggagcttgaaaagattatagaagaatacaaacctatgtttttaagtaaattaattgatgatttt

SEQ ID NO: 603 - protein, 127 aa, Borrelia burgdorferi
ISKDFSRGENMKKSFLSIYMLISISLLSCDVSRLNQRNINELKIFVEKAKYYSIKLDAIYNECTGAYNDIMTYSEGTFSDQSKVNQAISIFKKDNKIVNKFKELEKIIEEYKPMFLSKLIDDFAGSV

SEQ ID NO: 604 - protein, 95 aa, Borrelia burgdorferi
CDVSRLNQRNINELKIFVEKAKYYSIKLDAIYNECTGAYNDIMTYSEGTFSDQSKVNQAISIFKKDNKIVNKFKELEKIIEEYKPMFLSKLIDDF

SEQ ID NO: 605 - DNA, 783 bp, Borrelia burgdorferi
taaatacagagccattcaaggagagtatttatgaaatactatatatgtgtgtgtgtttttttgcttttgaatgcttgcaattcagattttagcactaatcaagaagatattaaatatccatctgataaagagaaatcaaaatccaacatggaagcaagctctaaagaagaagatccaaataaaaaaataaaaaatacactgcttaatgatttaataaatttgatagaaatagctaatgagcataaagaaaaatatgaaaaaagaatgcaagaagaaccttcagatcaatacggaatattggctttccaggaattagacttgtccgttggaaaaatatctgaagacaccccgcaatctaaaaaatttagaaaaaacacctattctcccttaagcgctattgatgtcaataaattaaaagatctttcagagattataagaaattcgggccaaatacaaggtttatttaatattttcaacagattcggaggcatttttgacgactcacttaatcacgtatattctaaaaaagatatcctagggggactagaaattttggatttagataaactaaaaaattcgtttgaaaaattactatctataaaagaaactttctcaaaaatgctaaatcaacttttattagattataaaaatgataaagatcatatacgaacagagacaaataaacttaaatctcatacaactgcacttttcgaacaacttgataaaaaagaagacgaagcatatgaacctaaaaatcagatattttcaataagtaacctttaa

SEQ ID NO: 606 - DNA, 685 bp, Borrelia burgdorferi
ttgcaattcagattttagcactaatcaagaagatattaaatatccatctgataaagagaaatcaaaatccaacatggaagcaagctctaaagaagaagatccaaataaaaaaataaaaaatacactgcttaatgatttaataaatttgatagaaatagctaatgagcataaagaaaaatatgaaaaaagaatgcaagaagaaccttcagatcaatacggaatattggctttccaggaattagacttgtccgttggaaaaatatctgaagacaccccgcaatctaaaaaatttagaaaaaacacctattctcccttaagcgctattgatgtcaataaattaaaagatctttcagagattataagaaattcgggccaaatacaaggtttatttaatattttcaacagattcggaggcatttttgacgactcacttaatcacgtatattctaaaaaagatatcctagggggactagaaattttggatttagataaactaaaaaattcgtttgaaaaattactatctataaaagaaactttctcaaaaatgctaaatcaacttttattagattataaaaatgataaagatcatatacgaacagagacaaataaacttaaatctcatacaactgcacttttcgaacaacttgataaaaaagaagacgaagcatatgaacctaaaaatcag

SEQ ID NO: 607 - protein, 259 aa, Borrelia burgdorferi
IQSHSRRVFMKYYICVCVFLLLNACNSDFSTNQEDIKYPSDKEKSKSNMEASSKEEDPNKKIKNTLLNDLINLIEIANEHKEKYEKRMQEEPSDQYGILAFQELDLSVGKISEDTPQSKKFRKNTYSPLSAIDVNKLKDLSEIIRNSGQIQGLFNIFNRFGGIFDDSLNHVYSKKDILGGLEILDLDKLKNSFEKLLSIKETFSKMLNQLLLDYKNDKDHIRTETNKLKSHTTALFEQLDKKEDEAYEPKNQIFSISNL

SEQ ID NO: 608 - protein, 228 aa, Borrelia burgdorferi
CNSDFSTNQEDIKYPSDKEKSKSNMEASSKEEDPNKKIKNTLLNDLINLIEIANEHKEKYEKRMQEEPSDQYGILAFQELDLSVGKISEDTPQSKKFRKNTYSPLSAIDVNKLKDLSEIIRNSGQIQGLFNIFNRFGGIFDDSLNHVYSKKDILGGLEILDLDKLKNSFEKLLSIKETFSKMLNQLLLDYKNDKDHIRTETNKLKSHTTALFEQLDKKEDEAYEPKNQ

SEQ ID NO: 609 - DNA, 912 bp, Borrelia burgdorferi
taaaggagggtatttatgaaataccacataattacaactatatttgtttttctgtttttagcttgcaggccggattttaatatcgatcaaaaagacattaaatacccgcctactgaaaaatcaaggcccaaaactgaaagctctaagcaaaaagaatcaaagcctaaaacagaagaagagcttaagaaaaaacaacaagaagaagagcttaagaaaaaacaacaagaagaagagcttaagaaaaaacaacaagaagaagagcttaagaaaaaacaacaagaagaagagaaggaagaactaagaaaacaacaactaaaaaatacgctatctaatgatttaaaaaagcaaatagaatcggcctacaattttaaagaaaaatatgtaaaaagtatggaaaaagaacctgaagaccattacgggatgacgtcttttaggggattgaattgggggccagggactgaagatatatctgacaataccgaaagatctataagatatagaagacacacttatactgttttaagccccctggatcctcatgaattaaaggaattcgcaaatattattcaagatataaataaactagcatcagtagcaagtatatttaattcttttagcgctattggaggagctcttgacatagtaagtgatcacctatatttcaaaaaagacaatctagacaaactagatattgcagatttagaaatacttaaaaattcatttgaacaaatattatatataaaaggaagtgttgcaggaaaagcaaaaaaacttttattagattataaaaatctaaaaacagatattaataagcttaaatcttattcaaatgaactggttaatggaattaagcaacaagctctagaagcagaaaatctagaagagcttatagtgtcaaaatataaactttaa

SEQ ID NO: 610 - DNA, 847 bp, Borrelia burgdorferi
ttgcaggccggattttaatatcgatcaaaaagacattaaatacccgcctactgaaaaatcaaggcccaaaactgaaagctctaagcaaaaagaatcaaagcctaaaacagaagaagagcttaagaaaaaacaacaagaagaagagcttaagaaaaaacaacaagaagaagagcttaagaaaaaacaacaagaagaagagcttaagaaaaaacaacaagaagaagagaaggaagaactaagaaaacaacaactaaaaaatacgctatctaatgatttaaaaaagcaaatagaatcggcctacaattttaaagaaaaatatgtaaaaagtatggaaaaagaacctgaagaccattacgggatgacgtcttttaggggattgaattgggggccagggactgaagatatatctgacaataccgaaagatctataagatatagaagacacacttatactgttttaagccccctggatcctcatgaattaaaggaattcgcaaatattattcaagatataaataaactagcatcagtagcaagtatatttaattcttttagcgctattggaggagctcttgacatagtaagtgatcacctatatttcaaaaaagacaatctagacaaactagatattgcagatttagaaatacttaaaaattcatttgaacaaatattatatataaaaggaagtgttgcaggaaaagcaaaaaaacttttattagattataaaaatctaaaaacagatattaataagcttaaatcttattcaaatgaactggttaatggaattaagcaacaagctctagaagcagaaaatctagaagagcttatagtgtcaaaatataaactt

SEQ ID NO: 611 - protein, 302 aa, Borrelia burgdorferi
RRVFMKYHIITTIFVFLFLACRPDFNIDQKDIKYPPTEKSRPKTESSKQKESKPKTEEELKKKQQEEELKKKQQEEELKKKQQEEELKKKQQEEEKEELRKQQLKNTLSNDLKKQIESAYNFKEKYVKSMEKEPEDHYGMTSFRGLNWGPGTEDISDNTERSIRYRRHTYTVLSPLDPHELKEFANIIQDINKLASVASIFNSFSAIGGALDIVSDHLYFKKDNLDKLDIADLEILKNSFEQILYIKGSVAGKAKKLLLDYKNLKTDINKLKSYSNELVNGIKQQALEAENLEELIVSKYKL

SEQ ID NO: 612 - protein, 282 aa, Borrelia burgdorferi
CRPDFNIDQKDIKYPPTEKSRPKTESSKQKESKPKTEEELKKKQQEEELKKKQQEEELKKKQQEEELKKKQQEEEKEELRKQQLKNTLSNDLKKQIESAYNFKEKYVKSMEKEPEDHYGMTSFRGLNWGPGTEDISDNTERSIRYRRHTYTVLSPLDPHELKEFANIIQDINKLASVASIFNSFSAIGGALDIVSDHLYFKKDNLDKLDIADLEILKNSFEQILYIKGSVAGKAKKLLLDYKNLKTDINKLKSYSNELVNGIKQQALEAENLEELIVSKYKL

SEQ ID NO: 613 - DNA, 828 bp, Borrelia burgdorferi
taaagaaagattaaatcatattcaaggagagtatttatgaaacactatataattgtgcatatatttgtttttctatttttaaatgcttgttatccagttgcatctaataaaatagaattaaaacctaaaacagaaacaagcttaaatcaagaagaagtcccaaatcaagaagcaaactacaaagaagaaaaagaagcaaaagaagaaggcattaataaaaaaacagaaaacacgctgcttaatgatttaagaaatttaatagaaacagctaaaaaagataatgataaatatacacaaaagttaaaagaagaatcctcaagccaatacggaatactggctttcaaagatttgttctggctagatggaacaaatgaacaattgtccgcaaataccgaaagatctaaagcctatagaaaacgagcttatagcatcttaaatactattaatgacgcttccttaaagaatttttcagaaattgtaatggcatcaggacaaacacagggcatatttaatacccttaactcacttgggggtaattttgaaaagatagttaattgtttgtatcccaaaaaagacaatttggaaaaattagagacttcagttttaaaaaagcttaaagattctttggaaaattttttagagataaaaaaaatcgcctcagaaatgatgcacaagctcttattagactatcaaaataatacaaatcgtatacaaacagataaaaatgaacttaagtcttatgcagacacacttttcaatcaaatgacaaaaaaacccgaagaagcactaaagctaaaaaataccatatgctcaatagaggacctttaa

SEQ ID NO: 614 - DNA, 706 bp, Borrelia burgdorferi
ttgttatccagttgcatctaataaaatagaattaaaacctaaaacagaaacaagcttaaatcaagaagaagtcccaaatcaagaagcaaactacaaagaagaaaaagaagcaaaagaagaaggcattaataaaaaaacagaaaacacgctgcttaatgatttaagaaatttaatagaaacagctaaaaaagataatgataaatatacacaaaagttaaaagaagaatcctcaagccaatacggaatactggctttcaaagatttgttctggctagatggaacaaatgaacaattgtccgcaaataccgaaagatctaaagcctatagaaaacgagcttatagcatcttaaatactattaatgacgcttccttaaagaatttttcagaaattgtaatggcatcaggacaaacacagggcatatttaatacccttaactcacttgggggtaattttgaaaagatagttaattgtttgtatcccaaaaaagacaatttggaaaaattagagacttcagttttaaaaaagcttaaagattctttggaaaattttttagagataaaaaaaatcgcctcagaaatgatgcacaagctcttattagactatcaaaataatacaaatcgtatacaaacagataaaaatgaacttaagtcttatgcagacacacttttcaatcaaatgacaaaaaaacccgaagaagcactaaag

SEQ ID NO: 615 - protein, 274 aa, Borrelia burgdorferi
RKIKSYSRRVFMKHYIIVHIFVFLFLNACYPVASNKIELKPKTETSLNQEEVPNQEANYKEEKEAKEEGINKKTENTLLNDLRNLIETAKKDNDKYTQKLKEESSSQYGILAFKDLFWLDGTNEQLSANTERSKAYRKRAYSILNTINDASLKNFSEIVMASGQTQGIFNTLNSLGGNFEKIVNCLYPKKDNLEKLETSVLKKLKDSLENFLEIKKIASEMMHKLLLDYQNNTNRIQTDKNELKSYADTLFNQMTKKPEEALKLKNTICSIEDL

SEQ ID NO: 616 - protein, 235 aa, Borrelia burgdorferi
CYPVASNKIELKPKTETSLNQEEVPNQEANYKEEKEAKEEGINKKTENTLLNDLRNLIETAKKDNDKYTQKLKEESSSQYGILAFKDLFWLDGTNEQLSANTERSKAYRKRAYSILNTINDASLKNFSEIVMASGQTQGIFNTLNSLGGNFEKIVNCLYPKKDNLEKLETSVLKKLKDSLENFLEIKKIASEMMHKLLLDYQNNTNRIQTDKNELKSYADTLFNQMTKKPEEALK

SEQ ID NO: 617 - DNA, 696 bp, Borrelia burgdorferi
taatctatactaattgaggagaatatttttatgaaaaacaacataattttatgcatgtgtgtttttttacttttaaatagctgcaccgctaaccatgaagctgaagcgaaaataaaaaaacatgttgataaaacaaaaaacgaatatattaatgaaataaaaaatttaatagcaacaaccaaagaaatcatcgaaaaacgaaaattgctacaagctaaaccagtagatcaaaaccccgtagatgatacaaacaataagaaagttttcgagatagataaaagagctttcgattttataaatagttttttaacagatgatgaatttaataaatttgtaacaatatttcataaaccaacactaaaatcacccggaaaagtattaaatagcatagcaattctagagctaaacatagagcaggtaattaatcacctagactcaaaaaatgagaccttaaataaagcaagctctttagatttggaaaagatcaaaaattcccttgaacagctgttctctataaggaattttttttcaacaatcataaaaagggtcttattagatcatcaaaacaatgaaaattctataaaaccagatgattctaaatcaggaacctatttcgatacgatatacgatcagtttaatgaaaaaaataaagaggttagaaatctgaaaaaaaccatattatcactgccgaattaa

SEQ ID NO: 618 - DNA, 592 bp, Borrelia burgdorferi
ctgcaccgctaaccatgaagctgaagcgaaaataaaaaaacatgttgataaaacaaaaaacgaatatattaatgaaataaaaaatttaatagcaacaaccaaagaaatcatcgaaaaacgaaaattgctacaagctaaaccagtagatcaaaaccccgtagatgatacaaacaataagaaagttttcgagatagataaaagagctttcgattttataaatagttttttaacagatgatgaatttaataaatttgtaacaatatttcataaaccaacactaaaatcacccggaaaagtattaaatagcatagcaattctagagctaaacatagagcaggtaattaatcacctagactcaaaaaatgagaccttaaataaagcaagctctttagatttggaaaagatcaaaaattcccttgaacagctgttctctataaggaattttttttcaacaatcataaaaagggtcttattagatcatcaaaacaatgaaaattctataaaaccagatgattctaaatcaggaacctatttcgatacgatatacgatcagtttaatgaaaaaaataaagaggttagaaatctgaaaaaa

SEQ ID NO: 619 - protein, 230 aa, Borrelia burgdorferi
SILIEENIFMKNNIILCMCVFLLLNSCTANHEAEAKIKKHVDKTKNEYINEIKNLIATTKEIIEKRKLLQAKPVDQNPVDDTNNKKVFEIDKRAFDFINSFLTDDEFNKFVTIFHKPTLKSPGKVLNSIAILELNIEQVINHLDSKNETLNKASSLDLEKIKNSLEQLFSIRNFFSTIIKRVLLDHQNNENSIKPDDSKSGTYFDTIYDQFNEKNKEVRNLKKTILSLPN

SEQ ID NO: 620 - protein, 197 aa, Borrelia burgdorferi
CTANHEAEAKIKKHVDKTKNEYINEIKNLIATTKEIIEKRKLLQAKPVDQNPVDDTNNKKVFEIDKRAFDFINSFLTDDEFNKFVTIFHKPTLKSPGKVLNSIAILELNIEQVINHLDSKNETLNKASSLDLEKIKNSLEQLFSIRNFFSTIIKRVLLDHQNNENSIKPDDSKSGTYFDTIYDQFNEKNKEVRNLKK

SEQ ID NO: 621 - DNA, 588 bp, Borrelia burgdorferi
taaaggagagtattaatgaaatgccatataattgcaactatatttgtttttctatttttagcttgcagtacagattttaatactgatcaaaaaggcattaaatacccgcctaccgaaaaatcaaagcccaaaactgaagactctaagcaaaaagaattaaagcctaaaacagaaaaagaactaaagaaaaaacaacaactaaaaaataaactacttaatgatttaaaaaattcaatagaaacagctaataagcataaagaaaagtataaaaaaagaatgaaagaagaacccgaagatcaatacggggtacaggctttcaaaggatcgaattgggggccggggactgaagatgtatctgccaacaccgaaagatctataagatttagaagacatacttatactattttaagcacgctgagtcttcatgaattaaaggaattctcaaatattgttacaaatgaaaataaactggtgccagtagtagatatgtttaatttctttagctctattgggacagctcttgatataacaaccgatagcttatatcccaaaaagacaatctggacaaaccagatctgtcggatttag

SEQ ID NO: 622 - DNA, 520 bp, Borrelia burgdorferi
ttgcagtacagattttaatactgatcaaaaaggcattaaatacccgcctaccgaaaaatcaaagcccaaaactgaagactctaagcaaaaagaattaaagcctaaaacagaaaaagaactaaagaaaaaacaacaactaaaaaataaactacttaatgatttaaaaaattcaatagaaacagctaataagcataaagaaaagtataaaaaaagaatgaaagaagaacccgaagatcaatacggggtacaggctttcaaaggatcgaattgggggccggggactgaagatgtatctgccaacaccgaaagatctataagatttagaagacatacttatactattttaagcacgctgagtcttcatgaattaaaggaattctcaaatattgttacaaatgaaaataaactggtgccagtagtagatatgtttaatttctttagctctattgggacagctcttgatataacaaccgatagcttatatcccaaaaagacaatctggacaaaccagatctgtcgg

SEQ ID NO: 623 - protein, 194 aa, Borrelia burgdorferi
RRVLMKCHIIATIFVFLFLACSTDFNTDQKGIKYPPTEKSKPKTEDSKQKELKPKTEKELKKKQQLKNKLLNDLKNSIETANKHKEKYKKRMKEEPEDQYGVQAFKGSNWGPGTEDVSANTERSIRFRRHTYTILSTLSLHELKEFSNIVTNENKLVPVVDMFNFFSSIGTALDITTDSLYPKKTIWTNQICRI

SEQ ID NO: 624 - protein, 173 aa, Borrelia burgdorferi
CSTDFNTDQKGIKYPPTEKSKPKTEDSKQKELKPKTEKELKKKQQLKNKLLNDLKNSIETANKHKEKYKKRMKEEPEDQYGVQAFKGSNWGPGTEDVSANTERSIRFRRHTYTILSTLSLHELKEFSNIVTNENKLVPVVDMFNFFSSIGTALDITTDSLYPKKTIWTNQICR

SEQ ID NO: 625 - DNA, 690 bp, Borrelia burgdorferi
taggagacaatctttatgaataaaaaaataaaaatgtttattatttgtgctatttttatgctgataagttcttgtaagaatgatgtaactagtaaagatttagaaggggcggtgaaagatttagaaagttcagaacaaaatgtaaaaaaaacagaacaagagataaaaaaacaagttgaaggatttttagaaattttagagacaaaagatttaaacacattagatacaaaagaaattgaaaaacaaattcaagaattaaagaataagatagaaaaattagactctaaaaaaacttctattgaaacatattctgggtatgaagaaaaaataaacaaaataaaagaaaaattaaacggaaaaggacttgaagataaattaaatgaactttcagagagcttaaaaaagaaaaaagaggagagaaaaaaagctttacaagaggctaaaaagaaatttgaagagtataaaaaccaagctgaatctgcaactggagtaacgcatggttctcaagtccaaagacaaggtggtgttggattacaagcttggcagtgtgctaatagtttggggtttaaaaatatgactagtggtaataatactagcgatatgaccaatgaagttataactaattcgcttaaaaagattgaagaagaacttaaaaatattggagaaactgtagaaggtaaaaaagaataa

SEQ ID NO: 626 - DNA, 616 bp, Borrelia burgdorferi
ttgtaagaatgatgtaactagtaaagatttagaaggggcggtgaaagatttagaaagttcagaacaaaatgtaaaaaaaacagaacaagagataaaaaaacaagttgaaggatttttagaaattttagagacaaaagatttaaacacattagatacaaaagaaattgaaaaacaaattcaagaattaaagaataagatagaaaaattagactctaaaaaaacttctattgaaacatattctgggtatgaagaaaaaataaacaaaataaaagaaaaattaaacggaaaaggacttgaagataaattaaatgaactttcagagagcttaaaaaagaaaaaagaggagagaaaaaaagctttacaagaggctaaaaagaaatttgaagagtataaaaaccaagctgaatctgcaactggagtaacgcatggttctcaagtccaaagacaaggtggtgttggattacaagcttggcagtgtgctaatagtttggggtttaaaaatatgactagtggtaataatactagcgatatgaccaatgaagttataactaattcgcttaaaaagattgaagaagaacttaaaaatattggagaaactgtagaaggtaaaaaagaa

SEQ ID NO: 627 - protein, 228 aa, Borrelia burgdorferi
ETIFMNKKIKMFIICAIFMLISSCKNDVTSKDLEGAVKDLESSEQNVKKTEQEIKKQVEGFLEILETKDLNTLDTKEIEKQIQELKNKIEKLDSKKTSIETYSGYEEKINKIKEKLNGKGLEDKLNELSESLKKKKEERKKALQEAKKKFEEYKNQAESATGVTHGSQVQRQGGVGLQAWQCANSLGFKNMTSGNNTSDMTNEVITNSLKKIEEELKNIGETVEGKKE

SEQ ID NO: 628 - protein, 205 aa, Borrelia burgdorferi
CKNDVTSKDLEGAVKDLESSEQNVKKTEQEIKKQVEGFLEILETKDLNTLDTKEIEKQIQELKNKIEKLDSKKTSIETYSGYEEKINKIKEKLNGKGLEDKLNELSESLKKKKEERKKALQEAKKKFEEYKNQAESATGVTHGSQVQRQGGVGLQAWQCANSLGFKNMTSGNNTSDMTNEVITNSLKKIEEELKNIGETVEGKKE

SEQ ID NO: 629 - DNA, 3990 bp, Borrelia burgdorferi
  misc_feature (1139): n equals a,t,g, or c
  misc_feature (1143): n equals a,t,g, or c
  misc_feature (1148): n equals a,t,g, or c
  misc_feature (1210): n equals a,t,g, or c
  misc_feature (1244): n equals a,t,g, or c
  misc_feature (1247): n equals a,t,g, or c
  misc_feature (1250): n equals a,t,g, or c
  misc_feature (1251): n equals a,t,g, or c
taagctggtaacactgtaaagacagctgagggggcttcaagtggtactgatgcaattggagaagttgtggataatgatgctaaggttgctgataaggcgagtgtgacggggattgctaaggggataaaggagattgttgaagctgctagggggagtgaaaagctgaaagttgctgctgctaaagagggcaatgaaaaggcagggaagttgtttgggaaggctggtgctaatgctcatggggacagtgaggctgctagcaaggcggctggtgctgttagtgctgttagtggggagcagatattaagtgcgattgttaaggctgcggatgcggctgagcaggatggaaagaagcctgcagatgctacaaatccgattgctgctgctattgggaataaagatgaggatgcggattttggtgatgggatgaagaaggatgatcagattgctgctgctattgctttgagggggatggctaaggatggaaagtttgctgtgaagaatgatgagaaagggaaggctgagggggctattaagggagctgctgcaattggagaagttgtggataatgctggtgctgcgaaggctgctgataaggatagtgtgaaggggattgctaaggggataaaggagattgttgaagctgctggggggagtgaaaagctgaaagctgctgctgctgaaggggagaataataaaaaggcagggaagttgtttgggaaagttgatggtgctgctggggacagtgaggctgctagcaaggcggctggtgctgttagtgctgttagtggggagcagatattaagtgcgattgttaaggctgctggtgaggctgagcaggatggagagaagcctgaggatgctaaaaatccgattgctgctgctattgggaagggtaatggggatggtgcggagtttgatcaggatgagatgaagaaggatgatcagattgctgctgctattgctttgagggggatggctaaggatggaaagtttgctgtgaagggtaataatgagaaagagaaggctgagggggctattaaagaagttagcgagttgttggataagctggtaacagctgtaaagacagctgagggggcttcaagtggtactgatgcaattggagaagttgtggataatgntgcnaaggntgctgataaggcgagtgtgacggggattgctaaggggataaaggagattgttgaagctgctngggggagtgaaaagctgaaagttgctgctgctanagnggnnaataataaagaggcagggaagttgtttgggaaggctggtgctgatgctaatggggacagtgaggctgctagcaaggcggctggtgctgttagtgctgttagtggggagcagatattaagtgcgattgttaaggctgcggctgctggtgcggctgatcaggatggagagaagcctggggatgctaaaaatccgattgctgctgctattgggaagggtaatgcggatgatggtgcggattttggtgatgggatgaagaaggatgatcagattgctgctgctattgctttgagggggatggctaaggatggaaagtttgctgtgaagaaggatgagaaagggaaggctgagggggctattaagggagctagcgagttgttggataagctggtaaaagctgtaaagacagctgagggggcttcaagtggtactgctgcaattggagaagttgtggataatgctgcgaaggctgctgataaggatagtgtgacggggattgctaaggggataaaggagattgttgaagctgcaggggggagtgaaaagctgaaagttgctgctgctaaaggggagaataataaaggggcagggaagttgtttgggaaggctggtgctaatgctcatggggacagtgaggctgctagcaaggcggctggtgctgttagtgctgttagtggggaacagatattaagtgcgattgttaaggctgctggtgaggctgctggtgatcaggagggaaagaagcctgaggaggctaaaaatccgattgctgctgctattggggataaagatggggatgcggagtttaatcaggatgggatgaagaaggatgatcagattgctgctgctattgctttgagggggatggctaaggatggaaagtttgctgtgaaggatggtggtgagaaagagaaggctgagggggctattaaaggagttagcgagttgttggataagctggtaaaagctgtaaagacagctgagggggcttcaagtggtactgctgcaattggagaagttgtggctgatgctgctaaggttgctgataaggcgagtgtgacggggattgctaaggggataaaggagattgttgaagctgctggggacagtgaggctgctagcaaggcagctggtgctgttagtgctgttagtggggagcagatattaagtgcgattgttaaggctgcggctgctggtgcggctgagcaggatggagagaagcctgcagaggctaaaaatccgattgctgctgctattgggaagggtgatggggatgcggattttggtgaggatgggatgaagaaggatgatcagattgctgctgctattgctttgagggggatggctaaggatggaaagtttgctgtgaagaatgatgagaaagggaaggctgagggggctattaagggagctgctgcaattggagaagttgtggataatgctggtgctgcgaaggctgctgataaggatagtgtgaaggggattgctaaggggataaaggagattgttgaagctgctggggggagtgaaaagctgaaagctgctgctgctgaaggggagaataataaaaaggcagggaagttgtttgggaaagttgatggtgctgctggggacagtgaggctgctagcaaggcggctggtgctgttagtgctgttagtggggagcagatattaagtgcgattgttaaggctgcggatgcggctgagcaggatggaaagaagcctgcagatgctacaaatccgattgctgctgctattgggaataaagatgaggatgcggattttggtgatgggatgaagaaggatgatcagattgctgctgctattgctttgagggggatggctaaggatggaaagtttgctgtgaagggtaataatgagaaagggaaggctgagggggcttcaagtggtactgatgcaattggagaagttgtggataatgatgcgaaggctgctgataaggcgagtgtgacggggattgctaaggggataaaggagattgttgaagctgctggggggagtgaaaagctgaaagctgttgctgctgctacaagggagaataataaagaggcagggaagttgtttgggaaagttgatgatgctcatgctggggacagtgaggctgctagcaaggcggctggtgctgttagtgctgttagtggggagcagatattaagtgcgattgttacggctgcggctgctggtgagcaggatggagagaagcctgcagaggctacaaatccgattgctgctgctattgggaagggtaatgaggatggtgcggattttggtaaggatgagatgaagaaggatgatcagattgctgctgctattgctttgagggggatggctaaggatggaaagtttgctgtgaagagtaatgatggtgagaaagggaaggctgagggggctattaaggaagttagcgagttgttggataagctggtaaaagctgtaaagacagctgagggggcttcaagcggtactgatgcaattggagaagttgtggctaatgctggtgctgcgaaggctgctgataaggcgagtgtgacggggattgctaaggggataaaggagattgttgaagctgctggggggagtaaaaagctgaaagctgctgctgctgaaggggagaataataaaaaggcagggaagttgtttgggaaggctggtgctggtgctggtgctaatggggacagtgaggctgctagcaaggcggctggtgctgttagtgctggttag

SEQ ID NO: 630 - DNA, 505 bp, Borrelia burgdorferi
  misc_feature (318): n equals a,t,g, or c
  misc_feature (322): n equals a,t,g, or c
  misc_feature (327): n equals a,t,g, or c
  misc_feature (389): n equals a,t,g, or c
  misc_feature (423): n equals a,t,g, or c
  misc_feature (426): n equals a,t,g, or c
  misc_feature (429): n equals a,t,g, or c
  misc_feature (430): n equals a,t,g, or c
tggtgaggctgagcaggatggagagaagcctgaggatgctaaaaatccgattgctgctgctattgggaagggtaatggggatggtgcggagtttgatcaggatgagatgaagaaggatgatcagattgctgctgctattgctttgagggggatggctaaggatggaaagtttgctgtgaagggtaataatgagaaagagaaggctgagggggctattaaagaagttagcgagttgttggataagctggtaacagctgtaaagacagctgagggggcttcaagtggtactgatgcaattggagaagttgtggataatgntgcnaaggntgctgataaggcgagtgtgacggggattgctaaggggataaaggagattgttgaagctgctngggggagtgaaaagctgaaagttgctgctgctanagnggnnaataataaagaggcagggaagttgtttgggaaggctggtgctgatgctaatggggacagtgaggctgctagcaag

SEQ ID NO: 631 - protein, 1328 aa, Borrelia burgdorferi
  SITE (379): Xaa equals any of the naturally occurring L-amino acids
  SITE (382): Xaa equals any of the naturally occurring L-amino acids
  SITE (403): Xaa equals any of the naturally occurring L-amino acids
  SITE (414): Xaa equals any of the naturally occurring L-amino acids
  SITE (415): Xaa equals any of the naturally occurring L-amino acids
  SITE (416): Xaa equals any of the naturally occurring L-amino acids
AGNTVKTAEGASSGTDAIGEVVDNDAKVADKASVTGIAKGIKEIVEAARGSEKLKVAAAKEGNEKAGKLFGKAGANAHGDSEAASKAAGAVSAVSGEQILSAIVKAADAAEQDGKKPADATNPIAAAIGNKDEDADFGDGMKKDDQIAAAIALRGMAKDGKFAVKNDEKGKAEGAIKGAAAIGEVVDNAGAAKAADKDSVKGIAKGIKEIVEAAGGSEKLKAAAAEGENNKKAGKLFGKVDGAAGDSEAASKAAGAVSAVSGEQILSAIVKAAGEAEQDGEKPEDAKNPIAAAIGKGNGDGAEFDQDEMKKDDQIAAAIALRGMAKDGKFAVKGNNEKEKAEGAIKEVSELLDKLVTAVKTAEGASSGTDAIGEVVDNXAKXADKASVTGIAKGIKEIVEAAXGSEKLKVAAAXXXNNKEAGKLFGKAGADANGDSEAASKAAGAVSAVSGEQILSAIVKAAAAGAADQDGEKPGDAKNPIAAAIGKGNADDGADFGDGMKKDDQIAAAIALRGMAKDGKFAVKKDEKGKAEGAIKGASELLDKLVKAVKTAEGASSGTAAIGEVVDNAAKAADKDSVTGIAKGIKEIVEAAGGSEKLKVAAAKGENNKGAGKLFGKAGANAHGDSEAASKAAGAVSAVSGEQILSAIVKAAGEAAGDQEGKKPEEAKNPIAAAIGDKDGDAEFNQDGMKKDDQIAAAIALRGMAKDGKFAVKDGGEKEKAEGAIKGVSELLDKLVKAVKTAEGASSGTAAIGEVVADAAKVADKASVTGIAKGIKEIVEAAGDSEAASKAAGAVSAVSGEQILSAIVKAAAAGAAEQDGEKPAEAKNPIAAAIGKGDGDADFGEDGMKKDDQIAAAIALRGMAKDGKFAVKNDEKGKAEGAIKGAAAIGEVVDNAGAAKAADKDSVKGIAKGIKEIVEAAGGSEKLKAAAAEGENNKKAGKLFGKVDGAAGDSEAASKAAGAVSAVSGEQILSAIVKAADAAEQDGKKPADATNPIAAAIGNKDEDADFGDGMKKDDQIAAAIALRGMAKDGKFAVKGNNEKGKAEGASSGTDAIGEVVDNDAKAADKASVTGIAKGIKEIVEAAGGSEKLKAVAAATRENNKEAGKLFGKVDDAHAGDSEAASKAAGAVSAVSGEQILSAIVTAAAAGEQDGEKPAEATNPIAAAIGKGNEDGADFGKDEMKKDDQIAAAIALRGMAKDGKFAVKSNDGEKGKAEGAIKEVSELLDKLVKAVKTAEGASSGTDAIGEVVANAGAAKAADKASVTGIAKGIKEIVEAAGGSKKLKAAAAEGENNKKAGKLFGKAGAGAGANGDSEAASKAAGAVSAG

SEQ ID NO: 632 - protein, 168 aa, Borrelia burgdorferi
  SITE (106): Xaa equals any of the naturally occurring L-amino acids
  SITE (109): Xaa equals any of the naturally occurring L-amino acids
  SITE (130): Xaa equals any of the naturally occurring L-amino acids
  SITE (141): Xaa equals any of the naturally occurring L-amino acids
  SITE (142): Xaa equals any of the naturally occurring L-amino acids
  SITE (143): Xaa equals any of the naturally occurring L-amino acids
GEAEQDGEKPEDAKNPIAAAIGKGNGDGAEFDQDEMKKDDQIAAAIALRGMAKDGKFAVKGNNEKEKAEGAIKEVSELLDKLVTAVKTAEGASSGTDAIGEVVDNXAKXADKASVTGIAKGIKEIVEAAXGSEKLKVAAAXXXNNKEAGKLFGKAGADANGDSEAASK

SEQ ID NO: 633 - DNA, 1008 bp, Borrelia burgdorferi
taaaaaggaaatataaatattatgcgattatgtttaataaaaatttttattatacctaatttagtatttagttctctttttttatttgaaagttgttctggttttctatctaaaaaatctatagaacagtttgcattagcattaaaagatcatcaagaaaataaaaatactactaatacttcagtagataaaaatagtaaggaaattgaatctcctaaagacgttacatcatcaaataaaaaaacttatgatccaatcttacaagtaggttctaatcaacatatgtcagatgatcctggtgctaataataaagaatccctaccaaattcaagtccagcaataatacaaaatgactcgcatgctcaaaataatgtaaagatggaagaaaataaatcagctactccacaacatgatccaattgaacaaagtaattttaaaaatagccttactacaacaagtaaaactcctgctattccttcagaagaagaaattaaagctaacttagatgaatttgcacaagaagagtatgagcaaacatctctttcagaaattaaaaatgccacgcaaattgttaatcatgctaatcctgaaaacaaattaaacaatacactccttgagtttgaaaaagattatgaaactttatcaaacttgttattctctaatttagacgcatctcctttgaatagaaaaataaagactattatgcctaaattacaagaaatgcgttcttttatggagcaagcaactaattcttgggtatctgctaaaggcatgctagatgaggctaaggataaactagcagaatctatttataaaagactatacaatggcaattcataccggttcggtggcagttttaacggacgtgatatgcaacatgcaaaaaatttagcatacagagctatagactttgcttctgcatgcattgaatatacacaaaaagctattgattatcttcaacagggaaattcttgcaaaaaagaaatagaaaatatattcaagctttaa

SEQ ID NO: 634 - DNA, 859 bp, Borrelia burgdorferi
aaaagatcatcaagaaaataaaaatactactaatacttcagtagataaaaatagtaaggaaattgaatctcctaaagacgttacatcatcaaataaaaaaacttatgatccaatcttacaagtaggttctaatcaacatatgtcagatgatcctggtgctaataataaagaatccctaccaaattcaagtccagcaataatacaaaatgactcgcatgctcaaaataatgtaaagatggaagaaaataaatcagctactccacaacatgatccaattgaacaaagtaattttaaaaatagccttactacaacaagtaaaactcctgctattccttcagaagaagaaattaaagctaacttagatgaatttgcacaagaagagtatgagcaaacatctctttcagaaattaaaaatgccacgcaaattgttaatcatgctaatcctgaaaacaaattaaacaatacactccttgagtttgaaaaagattatgaaactttatcaaacttgttattctctaatttagacgcatctcctttgaatagaaaaataaagactattatgcctaaattacaagaaatgcgttcttttatggagcaagcaactaattcttgggtatctgctaaaggcatgctagatgaggctaaggataaactagcagaatctatttataaaagactatacaatggcaattcataccggttcggtggcagttttaacggacgtgatatgcaacatgcaaaaaatttagcatacagagctatagactttgcttctgcatgcattgaatatacacaaaaagctattgattatcttcaacagggaaattcttgcaaaaaagaaatagaaaatatattcaag

SEQ ID NO: 635 - protein, 334 aa, Borrelia burgdorferi
KGNINIMRLCLIKIFIIPNLVFSSLFLFESCSGFLSKKSIEQFALALKDHQENKNTTNTSVDKNSKEIESPKDVTSSNKKTYDPILQVGSNQHMSDDPGANNKESLPNSSPAIIQNDSHAQNNVKMEENKSATPQHDPIEQSNFKNSLTTTSKTPAIPSEEEIKANLDEFAQEEYEQTSLSEIKNATQIVNHANPENKLNNTLLEFEKDYETLSNLLFSNLDASPLNRKIKTIMPKLQEMRSFMEQATNSWVSAKGMLDEAKDKLAESIYKRLYNGNSYRFGGSFNGRDMQHAKNLAYRAIDFASACIEYTQKAIDYLQQGNSCKKEIENIFKL

SEQ ID NO: 636 - protein, 286 aa, Borrelia burgdorferi
KDHQENKNTTNTSVDKNSKEIESPKDVTSSNKKTYDPILQVGSNQHMSDDPGANNKESLPNSSPAIIQNDSHAQNNVKMEENKSATPQHDPIEQSNFKNSLTTTSKTPAIPSEEEIKANLDEFAQEEYEQTSLSEIKNATQIVNHANPENKLNNTLLEFEKDYETLSNLLFSNLDASPLNRKIKTIMPKLQEMRSFMEQATNSWVSAKGMLDEAKDKLAESIYKRLYNGNSYRFGGSFNGRDMQHAKNLAYRAIDFASACIEYTQKAIDYLQQGNSCKKEIENIFK

SEQ ID NO: 637 - DNA, 630 bp, Borrelia burgdorferi
tagatgaatttaattgctaaattatttattttatccactttagtttcaattccaaatatcctctcttgtaacctatatgataatcttgcagacaacgctgagcaggttacagacatactagacaacaacaagtcttttaatactttaggaagcagcaatgagagtagaagtcgcaggcctagaagtacaaataatgcttatatgaaacaaaacatagacaaaaatcatttagttgttgcagatatgcaaaatgataatagtagcagcagtcttccccaacaagttaatagtgaatccagtaaagctaatgaagatagtaatattatgaaggaaattgaatcttctacagaagagtgcgctagactaagaaaagatttagaaactataaaacaaatacttgataatatagaaagcttgcttaatacagctaattcttatttagagaacgctagaaaagcacctaaatctaatcaagataatcaaaccttattgcttagcctgcaccaagctattgctaaggttaagagtagtcatacttcttttatcatttgttataatgatgcatttaattccctgggaatagctgatactgcctttaaagatgcaaagagaaaggcagttgaggcataa

SEQ ID NO: 638 - DNA, 562 bp, Borrelia burgdorferi
ttgtaacctatatgataatcttgcagacaacgctgagcaggttacagacatactagacaacaacaagtcttttaatactttaggaagcagcaatgagagtagaagtcgcaggcctagaagtacaaataatgcttatatgaaacaaaacatagacaaaaatcatttagttgttgcagatatgcaaaatgataatagtagcagcagtcttccccaacaagttaatagtgaatccagtaaagctaatgaagatagtaatattatgaaggaaattgaatcttctacagaagagtgcgctagactaagaaaagatttagaaactataaaacaaatacttgataatatagaaagcttgcttaatacagctaattcttatttagagaacgctagaaaagcacctaaatctaatcaagataatcaaaccttattgcttagcctgcaccaagctattgctaaggttaagagtagtcatacttcttttatcatttgttataatgatgcatttaattccctgggaatagctgatactgcctttaaagatgcaaagagaaaggcagttgaggca

SEQ ID NO: 639 - protein, 208 aa, Borrelia burgdorferi
MNLIAKLFILSTLVSIPNILSCNLYDNLADNAEQVTDILDNNKSFNTLGSSNESRSRRPRSTNNAYMKQNIDKNHLVVADMQNDNSSSSLPQQVNSESSKANEDSNIMKEIESSTEECARLRKDLETIKQILDNIESLLNTANSYLENARKAPKSNQDNQTLLLSLHQAIAKVKSSHTSFIICYNDAFNSLGIADTAFKDAKRKAVEA

SEQ ID NO: 640 - protein, 187 aa, Borrelia burgdorferi
CNLYDNLADNAEQVTDILDNNKSFNTLGSSNESRSRRPRSTNNAYMKQNIDKNHLVVADMQNDNSSSSLPQQVNSESSKANEDSNIMKEIESSTEECARLRKDLETIKQILDNIESLLNTANSYLENARKAPKSNQDNQTLLLSLHQAIAKVKSSHTSFIICYNDAFNSLGIADTAFKDAKRKAVEA

SEQ ID NO: 641 - DNA, 1080 bp, Borrelia burgdorferi
taaaaaaataaggaggtattaatgaaaaggaaaagcaatatatgtatttcacttctagtcacaatattatttgtgtcttgcaagttttttggaaataaaagcgcaagtaaagaaaaagaagaaacttctttttctgatactgctagcaagattagtaagtcgggaacagctgcttcttcagacaaacaagaaaaaaatacaagtgatgttacaggtgacgccaaaaagcatactagtagcccttacatgcttgctgatgcccttattgttagtgatactactaatagagatagagataagcaagaaaataaagataaattaaatgaagaagataaaaaaaagcttaatgctttttttagcacaactaaaacatatcaatctagcctagattccatttataacaaatatacaggctattataataccattgatacctatggcagctgtgatacgtatcgcattgagtgttttagtgtaggaccttctgaaaaacgtaaacaagctcttgctgatctagagaagttaaaactagacgaaaagtacactcagcttagcacaatgttaaagagtgctgtgcctagttattacaaaaaaaatttagatgattctattgcacagtataaggaagccataaagcaggctattgaagctgaaagtaaaatagagacagtaaaagactatgcaacagctcaaagtgctgccgatgacgaaaagaaaagaaatatagataatttaaaaatagttagagatgttcttcttattattaaaaaaactattgagaaagccagccgatcttatgctgatgcttttgctattgcaacatctagcttatcttgtagcgaatttaagcaagctgttaaagagtttaatgatgctgctaaacaatatgctaatggaaataaaggagacaatgctgtcaatgttattgtaggcactatttctagtatgccttatgtcaaatttaaagatgagtttgcaagagcaaaaatgtttgctcgtaattatagaggagacgaggtagacaagatgataagagctatcgacaagctgtgtgatgtttataaaaaagttgcgctttag

SEQ ID NO: 642 - DNA, 970 bp, Borrelia burgdorferi
ttgcaagttttttggaaataaaagcgcaagtaaagaaaaagaagaaacttctttttctgatactgctagcaagattagtaagtcgggaacagctgcttcttcagacaaacaagaaaaaaatacaagtgatgttacaggtgacgccaaaaagcatactagtagcccttacatgcttgctgatgcccttattgttagtgatactactaatagagatagagataagcaagaaaataaagataaattaaatgaagaagataaaaaaaagcttaatgctttttttagcacaactaaaacatatcaatctagcctagattccatttataacaaatatacaggctattataataccattgatacctatggcagctgtgatacgtatcgcattgagtgttttagtgtaggaccttctgaaaaacgtaaacaagctcttgctgatctagagaagttaaaactagacgaaaagtacactcagcttagcacaatgttaaagagtgctgtgcctagttattacaaaaaaaatttagatgattctattgcacagtataaggaagccataaagcaggctattgaagctgaaagtaaaatagagacagtaaaagactatgcaacagctcaaagtgctgccgatgacgaaaagaaaagaaatatagataatttaaaaatagttagagatgttcttcttattattaaaaaaactattgagaaagccagccgatcttatgctgatgcttttgctattgcaacatctagcttatcttgtagcgaatttaagcaagctgttaaagagtttaatgatgctgctaaacaatatgctaatggaaataaaggagacaatgctgtcaatgttattgtaggcactatttctagtatgccttatgtcaaatttaaagatgagtttgcaagagcaaaaatgtttgctcgtaattatagaggagacgaggtagacaagatgataagagctatcgacaag

SEQ ID NO: 643 - protein, 358 aa, Borrelia burgdorferi
KNKEVLMKRKSNICISLLVTILFVSCKFFGNKSASKEKEETSFSDTASKISKSGTAASSDKQEKNTSDVTGDAKKHTSSPYMLADALIVSDTTNRDRDKQENKDKLNEEDKKKLNAFFSTTKTYQSSLDSIYNKYTGYYNTIDTYGSCDTYRIECFSVGPSEKRKQALADLEKLKLDEKYTQLSTMLKSAVPSYYKKNLDDSIAQYKEAIKQAIEAESKIETVKDYATAQSAADDEKKRNIDNLKIVRDVLLIIKKTIEKASRSYADAFAIATSSLSCSEFKQAVKEFNDAAKQYANGNKGDNAVNVIVGTISSMPYVKFKDEFARAKMFARNYRGDEVDKMIRAIDKLCDVYKKVAL

SEQ ID NO: 644 - protein, 323 aa, Borrelia burgdorferi
CKFFGNKSASKEKEETSFSDTASKISKSGTAASSDKQEKNTSDVTGDAKKHTSSPYMLADALIVSDTTNRDRDKQENKDKLNEEDKKKLNAFFSTTKTYQSSLDSIYNKYTGYYNTIDTYGSCDTYRIECFSVGPSEKRKQALADLEKLKLDEKYTQLSTMLKSAVPSYYKKNLDDSIAQYKEAIKQAIEAESKIETVKDYATAQSAADDEKKRNIDNLKIVRDVLLIIKKTIEKASRSYADAFAIATSSLSCSEFKQAVKEFNDAAKQYANGNKGDNAVNVIVGTISSMPYVKFKDEFARAKMFARNYRGDEVDKMIRAIDK

SEQ ID NO: 645 - DNA, 696 bp, Borrelia burgdorferi
taaggaaatatgaggaatattagcaattgtatcaaatatattatattaacaatgcttattggattattaattttttgttgtgcaacctttgtttggttgattggaattttttattcaaataactttaaagaagagcggaattattcaataagcccaatagatagtgttattatgcgtaaatgttattttaaagaatttaagtctggacttattaaaagcgtattctttaagaaattagatgtaaatgttaactctaaaaattttaaggagctaaataaggtagataaacaaaatctgctaaattcttatccatcttatcatatggagtttgtcgtagttgataatggatttttaatgaattttaaaaatgttatttttaatggtatagatgatgctaaattatacgatcaacgtgatatggtttacggaggatttagatactcaaaagaggcttatttccaaattattggcaattatgatgttaaattaaataaaatgaaacaatatactccagcaattgtagtaaatgttttcaaaattaacattaatgatgctttatttaactcgttattaaagcaaaaaactttaaaagttactttgatttcccataataataaagagtatattttacaaactaataatttcttatcaaagtataattttcaaacaccagaaaaggagaatagttcttactaa

SEQ ID NO: 646 - DNA, 577 bp, Borrelia burgdorferi
aaataactttaaagaagagcggaattattcaataagcccaatagatagtgttattatgcgtaaatgttattttaaagaatttaagtctggacttattaaaagcgtattctttaagaaattagatgtaaatgttaactctaaaaattttaaggagctaaataaggtagataaacaaaatctgctaaattcttatccatcttatcatatggagtttgtcgtagttgataatggatttttaatgaattttaaaaatgttatttttaatggtatagatgatgctaaattatacgatcaacgtgatatggtttacggaggatttagatactcaaaagaggcttatttccaaattattggcaattatgatgttaaattaaataaaatgaaacaatatactccagcaattgtagtaaatgttttcaaaattaacattaatgatgctttatttaactcgttattaaagcaaaaaactttaaaagttactttgatttcccataataataaagagtatattttacaaactaataatttcttatcaaagtataattttcaaacaccagaaaaggagaatagttcttac

SEQ ID NO: 647 - protein, 230 aa, Borrelia burgdorferi
GNMRNISNCIKYIILTMLIGLLIFCCATFVWLIGIFYSNNFKEERNYSISPIDSVIMRKCYFKEFKSGLIKSVFFKKLDVNVNSKNFKELNKVDKQNLLNSYPSYHMEFVVVDNGFLMNFKNVIFNGIDDAKLYDQRDMVYGGFRYSKEAYFQIIGNYDVKLNKMKQYTPAIVVNVFKININDALFNSLLKQKTLKVTLISHNNKEYILQTNNFLSKYNFQTPEKENSSY

SEQ ID NO: 648 - protein, 192 aa, Borrelia burgdorferi
NNFKEERNYSISPIDSVIMRKCYFKEFKSGLIKSVFFKKLDVNVNSKNFKELNKVDKQNLLNSYPSYHMEFVVVDNGFLMNFKNVIFNGIDDAKLYDQRDMVYGGFRYSKEAYFQIIGNYDVKLNKMKQYTPAIVVNVFKININDALFNSLLKQKTLKVTLISHNNKEYILQTNNFLSKYNFQTPEKENSSY

SEQ ID NO: 649 - DNA, 837 bp, Borrelia burgdorferi
taaatgagcaaaaaagtaattttaatattactagaaattttgatcttgtcttgtgatttatctataaataaagaacaaaaaaccaaagaaaaaacatctgaaaagcaagaatctgaaaaacaaaatattgaaaaacaagagcctgaaaaacagaaacaaaatgcagcaaaaataatccctacggtatcaattcaaacggtagaaataagggaatcaaatcaaattccaaaaagcattgagaagtactacaagcaagcttatccgattcaaacattcactcttgattttagcatcacaagagaaaaggaatttctaaaaccagaagataaaatcttgcccacacaggggaaagtggagtctttgagcatcttaataaataaaaaattgttagactttaaagccccagaaaatccaaaaagctcaactttaaaaaatttcaaagaaattaaaaatattgagaatttcttccaaaatcaagacttattatttgtcttaacccttaaagataaaaataacaacaacactattaacatcatgctcaatcccccaaacgacatccaaaaacccaaagattatattttaaaagaccttaaagacacaattaaaaagggtactggtgagaaatacttaaatcctatctatagatttcaaataaaaaacaaaaaagattatcattcaatagattacaacaaagtgactattagcgaaaaaacaatagaattggacctactgcctcacgaacaagtctttcaaatgaataaaaatttcactaaaattttagacacaataacagacttaaataatctaaaattagtaattcaaaaagaattagtgtaa

SEQ ID NO: 650 - DNA, 724 bp, Borrelia burgdorferi
ttgtgatttatctataaataaagaacaaaaaaccaaagaaaaaacatctgaaaagcaagaatctgaaaaacaaaatattgaaaaacaagagcctgaaaaacagaaacaaaatgcagcaaaaataatccctacggtatcaattcaaacggtagaaataagggaatcaaatcaaattccaaaaagcattgagaagtactacaagcaagcttatccgattcaaacattcactcttgattttagcatcacaagagaaaaggaatttctaaaaccagaagataaaatcttgcccacacaggggaaagtggagtctttgagcatcttaataaataaaaaattgttagactttaaagccccagaaaatccaaaaagctcaactttaaaaaatttcaaagaaattaaaaatattgagaatttcttccaaaatcaagacttattatttgtcttaacccttaaagataaaaataacaacaacactattaacatcatgctcaatcccccaaacgacatccaaaaacccaaagattatattttaaaagaccttaaagacacaattaaaaagggtactggtgagaaatacttaaatcctatctatagatttcaaataaaaaacaaaaaagattatcattcaatagattacaacaaagtgactattagcgaaaaaacaatagaattggacctactgcctcacgaacaagtctttcaaatgaataaaaatttcactaaa

SEQ ID NO: 651 - protein, 277 aa, Borrelia burgdorferi
MSKKVILILLEILILSCDLSINKEQKTKEKTSEKQESEKQNIEKQEPEKQKQNAAKIIPTVSIQTVEIRESNQIPKSIEKYYKQAYPIQTFTLDFSITREKEFLKPEDKILPTQGKVESLSILINKKLLDFKAPENPKSSTLKNFKEIKNIENFFQNQDLLFVLTLKDKNNNNTINIMLNPPNDIQKPKDYILKDLKDTIKKGTGEKYLNPIYRFQIKNKKDYHSIDYNKVTISEKTIELDLLPHEQVFQMNKNFTKILDTITDLNNLKLVIQKELV

SEQ ID NO: 652 - protein, 241 aa, Borrelia burgdorferi
CDLSINKEQKTKEKTSEKQESEKQNIEKQEPEKQKQNAAKIIPTVSIQTVEIRESNQIPKSIEKYYKQAYPIQTFTLDFSITREKEFLKPEDKILPTQGKVESLSILINKKLLDFKAPENPKSSTLKNFKEIKNIENFFQNQDLLFVLTLKDKNNNNTINIMLNPPNDIQKPKDYILKDLKDTIKKGTGEKYLNPIYRFQIKNKKDYHSIDYNKVTISEKTIELDLLPHEQVFQMNKNFTK

SEQ ID NO: 653 - DNA, 579 bp, Borrelia burgdorferi
tagaaggaggaaaaaatgaaaattggaaagctaaattcaatagttatagccttgttttttaaactattggtcgcatgtagtattggattagtagaaagaacaaatgcagctcttgaatcgtcctctaaggatttaaaaaacaaaattttaaaaataaaaaaagaagccacgggaaaaggtgtactttttgaagcttttacaggtcttaaaaccggttccaaggtaacaagtggtggactagccttaagagaagcaaaagtacaagccattgttgaaacaggaaagttccttaagataatagaagaagaagctttaaagcttaaagaaactggaaacagtggtcaattcttggctatgtttgacttaatgcttgaggttgtagaatcgctagaagacgttggaataataggcttaaaagcccgtgttttagaggaatctaaaaataatcctataaacacagctgaaagattgcttgcggctaaagctcaaatagaaaatcaacttaaagtggttaaggaaaaacaaaatattgaaaatggtggagagaaaaaaaataataaaagcaaaaaaaagaaataa

SEQ ID NO: 654 - DNA, 502 bp, Borrelia burgdorferi
atgtagtattggattagtagaaagaacaaatgcagctcttgaatcgtcctctaaggatttaaaaaacaaaattttaaaaataaaaaaagaagccacgggaaaaggtgtactttttgaagcttttacaggtcttaaaaccggttccaaggtaacaagtggtggactagccttaagagaagcaaaagtacaagccattgttgaaacaggaaagttccttaagataatagaagaagaagctttaaagcttaaagaaactggaaacagtggtcaattcttggctatgtttgacttaatgcttgaggttgtagaatcgctagaagacgttggaataataggcttaaaagcccgtgttttagaggaatctaaaaataatcctataaacacagctgaaagattgcttgcggctaaagctcaaatagaaaatcaacttaaagtggttaaggaaaaacaaaatattgaaaatggtggagagaaaaaaaataataaaagcaaaaaaaagaaa

SEQ ID NO: 655 - protein, 191 aa, Borrelia burgdorferi
KEEKMKIGKLNSIVIALFFKLLVACSIGLVERTNAALESSSKDLKNKILKIKKEATGKGVLFEAFTGLKTGSKVTSGGLALREAKVQAIVETGKFLKIIEEEALKLKETGNSGQFLAMFDLMLEVVESLEDVGIIGLKARVLEESKNNPINTAERLLAAKAQIENQLKVVKEKQNIENGGEKKNNKSKKKK

SEQ ID NO: 656 - protein, 167 aa, Borrelia burgdorferi
CSIGLVERTNAALESSSKDLKNKILKIKKEATGKGVLFEAFTGLKTGSKVTSGGLALREAKVQAIVETGKFLKIIEEEALKLKETGNSGQFLAMFDLMLEVVESLEDVGIIGLKARVLEESKNNPINTAERLLAAKAQIENQLKVVKEKQNIENGGEKKNNKSKKKK

SEQ ID NO: 657 - DNA, 525 bp, Borrelia burgdorferi
taatttttaaaatttaaatatttacataatagtaatgtgtgtgggagacgtatgaaaaatattttattatttgttattttattattcttttcttgtaaagaatttaattattctgatcttaggagaaggccttcaaaggttttaaatgcttctaatggtgcatcaaataaagaacttaaaatttcttttgtagattctttaaatgatgatcaaaaagaagctttgttttttcttgaacaggtagttcttgatagcaatcccgacaagtttaatcaaatttttaatttaaatgaagagaaggtaaaagaaatgcttgttactgttgttaagtgtttaaaggccaaaagaaaggctaaaatggctcttgagagctcaaatgttgcaaatgttgccaatgctaaacagcaattgctacaggttgaaaaaacttacatagataatttgcgacaatcttttatgactactaaaaacattgaagaggcttgtaatcttgtaaaaaattatgatgcatctgcttcgttttaa

SEQ ID NO: 658 - DNA, 430 bp, Borrelia burgdorferi
ttgtaaagaatttaattattctgatcttaggagaaggccttcaaaggttttaaatgcttctaatggtgcatcaaataaagaacttaaaatttcttttgtagattctttaaatgatgatcaaaaagaagctttgttttttcttgaacaggtagttcttgatagcaatcccgacaagtttaatcaaatttttaatttaaatgaagagaaggtaaaagaaatgcttgttactgttgttaagtgtttaaaggccaaaagaaaggctaaaatggctcttgagagctcaaatgttgcaaatgttgccaatgctaaacagcaattgctacaggttgaaaaaacttacatagataatttgcgacaatcttttatgactactaaaaacattgaagaggcttgtaatcttgtaaaaaattatgatgcatctgcttcgttt

SEQ ID NO: 659 - protein, 173 aa, Borrelia burgdorferi
FLKFKYLHNSNVCGRRMKNILLFVILLFFSCKEFNYSDLRRRPSKVLNASNGASNKELKISFVDSLNDDQKEALFFLEQVVLDSNPDKFNQIFNLNEEKVKEMLVTVVKCLKAKRKAKMALESSNVANVANAKQQLLQVEKTYIDNLRQSFMTTKNIEEACNLVKNYDASASF

SEQ ID NO: 660 - protein, 143 aa, Borrelia burgdorferi
CKEFNYSDLRRRPSKVLNASNGASNKELKISFVDSLNDDQKEALFFLEQVVLDSNPDKFNQIFNLNEEKVKEMLVTVVKCLKAKRKAKMALESSNVANVANAKQQLLQVEKTYIDNLRQSFMTTKNIEEACNLVKNYDASASF

SEQ ID NO: 661 - DNA, 324 bp, Borrelia burgdorferi
taattattaaaatctaaggagaagagatttatgaacaaaaaattttctatttcattattatctacaatattagccttcttgttagtattaggttgtgatttgtcaagcaataatgctgaaaacaaaatggatgatatttttaatttagaaaagaaatacatggataattcaaattataaatgtttaagtaaaaatgaggctatagttaaaaattctaaaattaaattaggtgtaaataatactagaagtcgttcttattcttctagagagactaatgtttcggattcctataataaaacctattcatattgcaaaagcaactga

SEQ ID NO: 662 - DNA, 229 bp, Borrelia burgdorferi
ttgtgatttgtcaagcaataatgctgaaaacaaaatggatgatatttttaatttagaaaagaaatacatggataattcaaattataaatgtttaagtaaaaatgaggctatagttaaaaattctaaaattaaattaggtgtaaataatactagaagtcgttcttattcttctagagagactaatgtttcggattcctataataaaacctattcatattgcaaaagcaac

SEQ ID NO: 663 - protein, 106 aa, Borrelia burgdorferi
LLKSKEKRFMNKKFSISLLSTILAFLLVLGCDLSSNNAENKMDDIFNLEKKYMDNSNYKCLSKNEAIVKNSKIKLGVNNTRSRSYSSRETNVSDSYNKTYSYCKSN

SEQ ID NO: 664 - protein, 76 aa, Borrelia burgdorferi
CDLSSNNAENKMDDIFNLEKKYMDNSNYKCLSKNEAIVKNSKIKLGVNNTRSRSYSSRETNVSDSYNKTYSYCKSN

SEQ ID NO: 665 - DNA, 459 bp, Borrelia burgdorferi
  misc_feature (29): n equals a,t,g, or c
tgaatattaataataaaaaaaggaataanaatgaaaattatcaacatattattttgtttatttttactaatgctaaacagctgtaattctaatgatactaatactagccaaacaaaaagtagacaaaaacgtgatttaacccaaaaagaagcaacacaagaaaaaccaaaatctaaagaagacctgcttagagaaaagctatctgaagaccaaaaaacacatcttgactggttaaaaaccgctttaactggtgctggagaatttgataaatttttaggatatgacgaagacaaaataaaaggtgcacttaatcatataaagagtgaacttgataagtgtactggggataattctgaacaacaaaaaagcaccttcaaagaggtggttaagggggctcttggtggcggtatagatagttttgcaactagtgcaagtagtacctgccaagctcagcaataa

SEQ ID NO: 666 - DNA, 376 bp, Borrelia burgdorferi
ctgtaattctaatgatactaatactagccaaacaaaaagtagacaaaaacgtgatttaacccaaaaagaagcaacacaagaaaaaccaaaatctaaagaagacctgcttagagaaaagctatctgaagaccaaaaaacacatcttgactggttaaaaaccgctttaactggtgctggagaatttgataaatttttaggatatgacgaagacaaaataaaaggtgcacttaatcatataaagagtgaacttgataagtgtactggggataattctgaacaacaaaaaagcaccttcaaagaggtggttaagggggctcttggtggcggtatagatagttttgcaactagtgcaagtagtacctgccaagctcagcaa

SEQ ID NO: 667 - protein, 151 aa, Borrelia burgdorferi
  SITE (9): Xaa equals any of the naturally occurring L-amino acids
ILIIKKGIXMKIINILFCLFLLMLNSCNSNDTNTSQTKSRQKRDLTQKEATQEKPKSKEDLLREKLSEDQKTHLDWLKTALTGAGEFDKFLGYDEDKIKGALNHIKSELDKCTGDNSEQQKSTFKEVVKGALGGGIDSFATSASSTCQAQQ

SEQ ID NO: 668 - protein, 125 aa, Borrelia burgdorferi
CNSNDTNTSQTKSRQKRDLTQKEATQEKPKSKEDLLREKLSEDQKTHLDWLKTALTGAGEFDKFLGYDEDKIKGALNHIKSELDKCTGDNSEQQKSTFKEVVKGALGGGIDSFATSASSTCQAQQ

SEQ ID NO: 669 - DNA, 1047 bp, Borrelia burgdorferi
taggagagaataattatgaataaaaaaacattgattatttgtgctgtttttgcgctgataatttcttgcaagaattttgcaactggtaaagatataaaacaaaattcagaagggaaaattaaaggatttgtaaataagattttagatccagtaaaggataaaattgcttcaagtggtacaaaagtagatgaagtagcaaaaaaattacaagaagaagaaaaagaagaattaatgcagggcgatgatcctaatggcagtggaataaatccgccaccagtattgccggaaaatattcacaataatgcattagtattaaaagcaatagaacaaagtgatggtcaacaagaaaaaaaagtagaagaagctgaagctaaagttgaagaaaataaagaaaaacaagagaatacagaagaaaacattaaagaaaaagaaataatagacgaacaaaacaaacaagaattagctaaagctaaagaagaagaacaacaaaaagaacaaaaaagacatcaagaagagcaacaaagaaaagctaaagcagaaaaagaaaaaagagaaagagaagaggcagaacaacaaaaacgacaacaagaagaggaagaaaaaaggcaagttgataaccaaattaaaacacttatagctaaaatagatgagatcaatgaaaatattgatgttataaaatggcaaacgactgtaggcccacaaggcgttatagatagaattactgggcctgtgtatgatgattttaccaatggcaataattctatacgcgaaacttgggaggggttagaagaggaatcagaagacgaaggattaggaaaattattgaaagaattgagtgatgctagggacgcgctaagaactaaattaaatgaaggcaataaaccatatactggttacgaagagcctaagttaaaagaaagtgtaaatgttagcgaaattaaagaagatttagaaaaattaaaatcaaaattagaagaagttaaaaaatatcttaaagatagttctaaatttgaagaaattaaaggatacatcagtgacagtcagtaa

SEQ ID NO: 670 - DNA, 979 bp, Borrelia burgdorferi
ttgcaagaattttgcaactggtaaagatataaaacaaaattcagaagggaaaattaaaggatttgtaaataagattttagatccagtaaaggataaaattgcttcaagtggtacaaaagtagatgaagtagcaaaaaaattacaagaagaagaaaaagaagaattaatgcagggcgatgatcctaatggcagtggaataaatccgccaccagtattgccggaaaatattcacaataatgcattagtattaaaagcaatagaacaaagtgatggtcaacaagaaaaaaaagtagaagaagctgaagctaaagttgaagaaaataaagaaaaacaagagaatacagaagaaaacattaaagaaaaagaaataatagacgaacaaaacaaacaagaattagctaaagctaaagaagaagaacaacaaaaagaacaaaaaagacatcaagaagagcaacaaagaaaagctaaagcagaaaaagaaaaaagagaaagagaagaggcagaacaacaaaaacgacaacaagaagaggaagaaaaaaggcaagttgataaccaaattaaaacacttatagctaaaatagatgagatcaatgaaaatattgatgttataaaatggcaaacgactgtaggcccacaaggcgttatagatagaattactgggcctgtgtatgatgattttaccaatggcaataattctatacgcgaaacttgggaggggttagaagaggaatcagaagacgaaggattaggaaaattattgaaagaattgagtgatgctagggacgcgctaagaactaaattaaatgaaggcaataaaccatatactggttacgaagagcctaagttaaaagaaagtgtaaatgttagcgaaattaaagaagatttagaaaaattaaaatcaaaattagaagaagttaaaaaatatcttaaagatagttctaaatttgaagaaattaaaggatacatcagtgacagtcag

SEQ ID NO: 671 - protein, 347 aa, Borrelia burgdorferi
ERIIMNKKTLIICAVFALIISCKNFATGKDIKQNSEGKIKGFVNKILDPVKDKIASSGTKVDEVAKKLQEEEKEELMQGDDPNGSGINPPPVLPENIHNNALVLKAIEQSDGQQEKKVEEAEAKVEENKEKQENTEENIKEKEIIDEQNKQELAKAKEEEQQKEQKRHQEEQQRKAKAEKEKREREEAEQQKRQQEEEEKRQVDNQIKTLIAKIDEINENIDVIKWQTTVGPQGVIDRITGPVYDDFTNGNNSIRETWEGLEEESEDEGLGKLLKELSDARDALRTKLNEGNKPYTGYEEPKLKESVNVSEIKEDLEKLKSKLEEVKKYLKDSSKFEEIKGYISDSQ

SEQ ID NO: 672 - protein, 326 aa, Borrelia burgdorferi
CKNFATGKDIKQNSEGKIKGFVNKILDPVKDKIASSGTKVDEVAKKLQEEEKEELMQGDDPNGSGINPPPVLPENIHNNALVLKAIEQSDGQQEKKVEEAEAKVEENKEKQENTEENIKEKEIIDEQNKQELAKAKEEEQQKEQKRHQEEQQRKAKAEKEKREREEAEQQKRQQEEEEKRQVDNQIKTLIAKIDEINENIDVIKWQTTVGPQGVIDRITGPVYDDFTNGNNSIRETWEGLEEESEDEGLGKLLKELSDARDALRTKLNEGNKPYTGYEEPKLKESVNVSEIKEDLEKLKSKLEEVKKYLKDSSKFEEIKGYISDSQ

SEQ ID NO: 673 - DNA, 522 bp, Borrelia burgdorferi
  misc_feature (506): n equals a,t,g, or c
  misc_feature (510): n equals a,t,g, or c
tgaatattaataataaaaaaaggagtaacaatgaaaatcatcaacatattattttgtatatctttgctactactaaatagctgtaattccaatgataatgacactttaaaaaacaatgcccaacaaacaaaaagcaggaaaaaacgtgatttaagccaagaagaactgccacaacaagaaaaaatcactttaacatccgacgaagaaaaaatgtttacttcattaatcaatgtgtttaaatacacaattgaaaaattaaacaatgaaatacaagggtgcatgaatggaaacaaaagtaaatgtaatgacttctttgattggctttctgaagatattcaaaaacaaaaagaattagctggtgcttttaccaaggtttacaacttcttaaaatcaaaagcacaaaatgaaacttttgatacttatattaaaggagctattgattgtaaaaaaaacactccacaagattgtaataaaaataatgaaatatggggaggtggacaacttantagngcaatattttag

SEQ ID NO: 674 - DNA, 403 bp, Borrelia burgdorferi
ctgtaattccaatgataatgacactttaaaaaacaatgcccaacaaacaaaaagcaggaaaaaacgtgatttaagccaagaagaactgccacaacaagaaaaaatcactttaacatccgacgaagaaaaaatgtttacttcattaatcaatgtgtttaaatacacaattgaaaaattaaacaatgaaatacaagggtgcatgaatggaaacaaaagtaaatgtaatgacttctttgattggctttctgaagatattcaaaaacaaaaagaattagctggtgcttttaccaaggtttacaacttcttaaaatcaaaagcacaaaatgaaacttttgatacttatattaaaggagctattgattgtaaaaaaaacactccacaagattgtaataaaaataatgaa

SEQ ID NO: 675 - protein, 172 aa, Borrelia burgdorferi
  SITE (168): Xaa equals any of the naturally occurring L-amino acids
  SITE (169): Xaa equals any of the naturally occurring L-amino acids
ILIIKKGVTMKIINILFCISLLLLNSCNSNDNDTLKNNAQQTKSRKKRDLSQEELPQQEKITLTSDEEKMFTSLINVFKYTIEKLNNEIQGCMNGNKSKCNDFFDWLSEDIQKQKELAGAFTKVYNFLKSKAQNETFDTYIKGAIDCKKNTPQDCNKNNEIWGGGQLXXAIF

SEQ ID NO: 676 - protein, 134 aa, Borrelia burgdorferi
CNSNDNDTLKNNAQQTKSRKKRDLSQEELPQQEKITLTSDEEKMFTSLINVFKYTIEKLNNEIQGCMNGNKSKCNDFFDWLSEDIQKQKELAGAFTKVYNFLKSKAQNETFDTYIKGAIDCKKNTPQDCNKNNE

SEQ ID NO: 677 - DNA, 1605 bp, Borrelia burgdorferi
  misc_feature (1535): n equals a,t,g, or c
  misc_feature (1567): n equals a,t,g, or c
  misc_feature (1571): n equals a,t,g, or c
  misc_feature (1593): n equals a,t,g, or c
  misc_feature (1594): n equals a,t,g, or c
  misc_feature (1599): n equals a,t,g, or c
taaatgttcaaaacaatcattaaacaaaaaaatatgaaaaaaatttcaagtgcaattttattaacaactttctttgtttttattaattgtaaaagccaagttgctgataaggcgagtgtgacggggattgctaagggaataaaggagattgttgaagctgctggggggagtgaaaagctgaaagttgctgctgctgaaggggagaataatgaaaaggcagggaagttgtttgggaaggctggtgctggtaatgctggggacagtgaggctgctagcaaggcggctggtgctgttagtgctgttagtggggagcagatattaagtgcgattgttaaggctgctggtgaggctgcgcaggatggagagaagcctggggaggctaaaaatccgattgctgctgctattgggaagggtaatgaggatggtgcggagtttaaggatgagatgaagaaggatgatcagattgctgctgctattgctttgagggggatggctaaggatggaaagtttgctgtgaagaatgatgagaaagggaaggctgagggggctattaagggagctggcgagttgttggataagctggtaaaagctgtaaagacagctgagggggcttcaagtggtactgctgcaattggagaagttgtggctgatgataatgctgcgaaggttgctgataaggcgagtgtgaaggggattgctaaggggataaaggagattgttgaagctgctggggggagtaaaaagctgaaagttgctgctgctaaagagggcaatgaaaaggcagggaagttgtttgggaaagttgatgctgctcatgctggggacagtgaggctgctagcaaggcggctggtgctgttagtgctgttagtggggagcagatattaagtgcgattgttaaggctgctggtgcggctgctggtgatcaggagggaaagaagcctggggatgctaaaaatccgattgctgctgctattgggaagggtgatgcggagaatggtgcggagtttaatcatgatgggatgaagaaggatgatcagattgctgctgctattgctttgagggggatggctaaggatggaaagtttgctgtgaagagtggtggtggtgagaaagggaaggctgagggggctattaagggagctgctgagttgttggataagctggtaaaagctgtaaagacagctgagggggcttcaagtggtactgatgcaattggagaagttgtggctaatgctggtgctgcaaaggttgctgataaggcgagtgtgacggggattgctaaggggataaaggagattgttgaagctgctggggggagtgaaaagctgaaagttgctgctgctacaggggagagtaataaaggggcagggaagttgtttgggaaggctggtgctggtgctaatgctggggacagtgaggctgctagcaaggcggctggtgctgttagtgctgttagtggggagcagatattaagtgcgattgttaaggctgctgatgcggctgatcaggagggaaagaagcctggggatgctanaaatccgattgctgctgctattgggaagggtnatgnggagaatggtgcggagtttaannatganggatga

SEQ ID NO: 678 - DNA, 469 bp, Borrelia burgdorferi
ttgtaaaagccaagttgctgataaggcgagtgtgacggggattgctaagggaataaaggagattgttgaagctgctggggggagtgaaaagctgaaagttgctgctgctgaaggggagaataatgaaaaggcagggaagttgtttgggaaggctggtgctggtaatgctggggacagtgaggctgctagcaaggcggctggtgctgttagtgctgttagtggggagcagatattaagtgcgattgttaaggctgctggtgaggctgcgcaggatggagagaagcctggggaggctaaaaatccgattgctgctgctattgggaagggtaatgaggatggtgcggagtttaaggatgagatgaagaaggatgatcagattgctgctgctattgctttgagggggatggctaaggatggaaagtttgctgtgaagaatgatgagaaagggaaggctgagggggctattaag

SEQ ID NO: 679 - protein, 533 aa, Borrelia burgdorferi
  SITE (511): Xaa equals any of the naturally occurring L-amino acids
  SITE (522): Xaa equals any of the naturally occurring L-amino acids
  SITE (523): Xaa equals any of the naturally occurring L-amino acids
  SITE (530): Xaa equals any of the naturally occurring L-amino acids
  SITE (531): Xaa equals any of the naturally occurring L-amino acids
  SITE (532): Xaa equals any of the naturally occurring L-amino acids
MFKTIIKQKNMKKISSAILLTTFFVFINCKSQVADKASVTGIAKGIKEIVEAAGGSEKLKVAAAEGENNEKAGKLFGKAGAGNAGDSEAASKAAGAVSAVSGEQILSAIVKAAGEAAQDGEKPGEAKNPIAAAIGKGNEDGAEFKDEMKKDDQIAAAIALRGMAKDGKFAVKNDEKGKAEGAIKGAGELLDKLVKAVKTAEGASSGTAAIGEVVADDNAAKVADKASVKGIAKGIKEIVEAAGGSKKLKVAAAKEGNEKAGKLFGKVDAAHAGDSEAASKAAGAVSAVSGEQILSAIVKAAGAAAGDQEGKKPGDAKNPIAAAIGKGDAENGAEFNHDGMKKDDQIAAAIALRGMAKDGKFAVKSGGGEKGKAEGAIKGAAELLDKLVKAVKTAEGASSGTDAIGEVVANAGAAKVADKASVTGIAKGIKEIVEAAGGSEKLKVAAATGESNKGAGKLFGKAGAGANAGDSEAASKAAGAVSAVSGEQILSAIVKAADAADQEGKKPGDAXNPIAAAIGKGXXENGAEFXXXG

SEQ ID NO: 680 - protein, 156 aa, Borrelia burgdorferi
CKSQVADKASVTGIAKGIKEIVEAAGGSEKLKVAAAEGENNEKAGKLFGKAGAGNAGDSEAASKAAGAVSAVSGEQILSAIVKAAGEAAQDGEKPGEAKNPIAAAIGKGNEDGAEFKDEMKKDDQIAAAIALRGMAKDGKFAVKNDEKGKAEGAIK

SEQ ID NO: 681 - DNA, 1125 bp, Borrelia burgdorferi
tagaaattcaaaacaaaggagaaaacaaaaagtatgaataaaaaaatattgattatttttgctgtttttgcacttataatttcttgtaaaaattatgcaactggtaaagatataaaacaaaatgcaaaagggaaaattaaaggatttttagataaggttttagatccagcaaaagataaaattacttcaagtagttcaaaagtagatgaattagcaaaaaaattacaagaagaagatgaagataatgaattaatgcagggcgatgatcctaataacagagcaatagcactgttaccagtattgccggaaaatagtcatgacaatccaccagtaccaaaagtaaaagcagcagcacaaagtggtggtcaacaagaagaccaaaaagcaaaagaatctaaagataaagttgaggaagaaaaagaagttgtagaggagaaaaaagaagaacaagatagtaaaaaagaaaaagtggagaagcaaagtcaaaagcaaaaagaagaagagagaaactctaaagaagaacaacaaaaacaagaagaagcaaaagctagagcagatagagaaagagaagaacgactaaaacaacaagaacaaaaaagacaacaggaagaagctagggttaaagcagaaaaagaaaaacaagaaagagaggaacaacaaaaacaagaagaagaaaagaaagttaaatataaaattaaaacacttacagacaaaatagatgaaataaataaggatattgatggtataaatggtaaaacaattgtaggagcagaagaagttatagataaaattacggggcctgtatatgatgattttactgatgggaataaagctatatacaaaacttggggagatttagaggatgaagaaggcgaagaattaggaaaattattgaaagaattgagtgatactagacataatttaagaaccaaattaaatgagggtaataaagcatatattgttctagaaaaggagcctaatttaaaagaaaatgtaaatgttagtgatattcaatcagatttagaaaaattaaaatcaggattagaagaagttaaaaaatattttgaaaatgaagataattttgaagaaattaaaggatacattgaggatagtaattcatattga

SEQ ID NO: 682 - DNA, 1039 bp, Borrelia burgdorferi
ttgtaaaaattatgcaactggtaaagatataaaacaaaatgcaaaagggaaaattaaaggatttttagataaggttttagatccagcaaaagataaaattacttcaagtagttcaaaagtagatgaattagcaaaaaaattacaagaagaagatgaagataatgaattaatgcagggcgatgatcctaataacagagcaatagcactgttaccagtattgccggaaaatagtcatgacaatccaccagtaccaaaagtaaaagcagcagcacaaagtggtggtcaacaagaagaccaaaaagcaaaagaatctaaagataaagttgaggaagaaaaagaagttgtagaggagaaaaaagaagaacaagatagtaaaaaagaaaaagtggagaagcaaagtcaaaagcaaaaagaagaagagagaaactctaaagaagaacaacaaaaacaagaagaagcaaaagctagagcagatagagaaagagaagaacgactaaaacaacaagaacaaaaaagacaacaggaagaagctagggttaaagcagaaaaagaaaaacaagaaagagaggaacaacaaaaacaagaagaagaaaagaaagttaaatataaaattaaaacacttacagacaaaatagatgaaataaataaggatattgatggtataaatggtaaaacaattgtaggagcagaagaagttatagataaaattacggggcctgtatatgatgattttactgatgggaataaagctatatacaaaacttggggagatttagaggatgaagaaggcgaagaattaggaaaattattgaaagaattgagtgatactagacataatttaagaaccaaattaaatgagggtaataaagcatatattgttctagaaaaggagcctaatttaaaagaaaatgtaaatgttagtgatattcaatcagatttagaaaaattaaaatcaggattagaagaagttaaaaaatattttgaaaatgaagataattttgaagaaattaaaggatacattgaggatagtaattcatat

SEQ ID NO: 683 - protein, 373 aa, Borrelia burgdorferi
KFKTKEKTKSMNKKILIIFAVFALIISCKNYATGKDIKQNAKGKIKGFLDKVLDPAKDKITSSSSKVDELAKKLQEEDEDNELMQGDDPNNRAIALLPVLPENSHDNPPVPKVKAAAQSGGQQEDQKAKESKDKVEEEKEVVEEKKEEQDSKKEKVEKQSQKQKEEERNSKEEQQKQEEAKARADREREERLKQQEQKRQQEEARVKAEKEKQEREEQQKQEEEKKVKYKIKTLTDKIDEINKDIDGINGKTIVGAEEVIDKITGPVYDDFTDGNKAIYKTWGDLEDEEGEELGKLLKELSDTRHNLRTKLNEGNKAYIVLEKEPNLKENVNVSDIQSDLEKLKSGLEEVKKYFENEDNFEEIKGYIEDSNSY

SEQ ID NO: 684 - protein, 346 aa, Borrelia burgdorferi
CKNYATGKDIKQNAKGKIKGFLDKVLDPAKDKITSSSSKVDELAKKLQEEDEDNELMQGDDPNNRAIALLPVLPENSHDNPPVPKVKAAAQSGGQQEDQKAKESKDKVEEEKEVVEEKKEEQDSKKEKVEKQSQKQKEEERNSKEEQQKQEEAKARADREREERLKQQEQKRQQEEARVKAEKEKQEREEQQKQEEEKKVKYKIKTLTDKIDEINKDIDGINGKTIVGAEEVIDKITGPVYDDFTDGNKAIYKTWGDLEDEEGEELGKLLKELSDTRHNLRTKLNEGNKAYIVLEKEPNLKENVNVSDIQSDLEKLKSGLEEVKKYFENEDNFEEIKGYIEDSNSY

SEQ ID NO: 685 - DNA, 696 bp, Borrelia burgdorferi
taacttatgaataagaaaatgaaaatgtttattatttgtgctgtttttgcattgatgatttcttgcaagaattatgcaagtggtgaaaatctaaaaaattcagaacaaaatctagaaagttcagaacaaaatgtaaaaaaaacagaacaagagataaaaaaacaagttgaaggatttttagaaattctagagacaaaagatttatctaaattagatgaaaaagatacaaaagaaattgaaaaacaaattcaagaattaaagaataaaatagaaaaattagattctaaaaaaacttctattgaaacatattctgagtatgaagaaaaaataaacaaaataaaagaaaaattgaaaggaaaaggacttgaagataaatttaaggagcttgaagagagtttagcaaagaaaaagggggagagaaaaaaagctttacaagaggccaaacagaaatttgaagaatataaaaaacaagtagatacttcaactgggaaaactcaaggcgacaggtctaaaaaccgaggtggtgttggagtgcaagcttggcagtgtgccaatgaattaggtttgggtgtaagttattctaatggcggcagtgacaacagcaatactgatgaattagcaaacaaagttatagatgattctcttaaaaagattgaagaagaacttaagggaatagaagaagataaaaaagaataa

SEQ ID NO: 686 - DNA, 631 bp, Borrelia burgdorferi
ttgcaagaattatgcaagtggtgaaaatctaaaaaattcagaacaaaatctagaaagttcagaacaaaatgtaaaaaaaacagaacaagagataaaaaaacaagttgaaggatttttagaaattctagagacaaaagatttatctaaattagatgaaaaagatacaaaagaaattgaaaaacaaattcaagaattaaagaataaaatagaaaaattagattctaaaaaaacttctattgaaacatattctgagtatgaagaaaaaataaacaaaataaaagaaaaattgaaaggaaaaggacttgaagataaatttaaggagcttgaagagagtttagcaaagaaaaagggggagagaaaaaaagctttacaagaggccaaacagaaatttgaagaatataaaaaacaagtagatacttcaactgggaaaactcaaggcgacaggtctaaaaaccgaggtggtgttggagtgcaagcttggcagtgtgccaatgaattaggtttgggtgtaagttattctaatggcggcagtgacaacagcaatactgatgaattagcaaacaaagttatagatgattctcttaaaaagattgaagaagaacttaagggaatagaagaagataaaaaagaa

SEQ ID NO: 687 - protein, 230 aa, Borrelia burgdorferi
LMNKKMKMFIICAVFALMISCKNYASGENLKNSEQNLESSEQNVKKTEQEIKKQVEGFLEILETKDLSKLDEKDTKEIEKQIQELKNKIEKLDSKKTSIETYSEYEEKINKIKEKLKGKGLEDKFKELEESLAKKKGERKKALQEAKQKFEEYKKQVDTSTGKTQGDRSKNRGGVGVQAWQCANELGLGVSYSNGGSDNSNTDELANKVIDDSLKKIEEELKGIEEDKKE

SEQ ID NO: 688 - protein, 210 aa, Borrelia burgdorferi
CKNYASGENLKNSEQNLESSEQNVKKTEQEIKKQVEGFLEILETKDLSKLDEKDTKEIEKQIQELKNKIEKLDSKKTSIETYSEYEEKINKIKEKLKGKGLEDKFKELEESLAKKKGERKKALQEAKQKFEEYKKQVDTSTGKTQGDRSKNRGGVGVQAWQCANELGLGVSYSNGGSDNSNTDELANKVIDDSLKKIEEELKGIEEDKKE

SEQ ID NO: 689 - DNA, 1083 bp, Borrelia burgdorferi
taattgtttggggttgtggtaaacttaaggcttatggagtggattatgaataaaaaaatgaaaatatttattatttgtgctgtatttgtgctgataagttcttgcaagattgatgcaactggtaaagatgcaactggtaaagatgcaactggtaaagatgcaactggtaaagatgcaactggtaaaaatgcagaacaaaatataaaagggaaagttcaaggatttttagaaaagattttagatccagtaaaggataaaattgcttcaaatggtccaatagcagatgaattggcaaaaaaattacaagaagaagaaaaggtaaataacggggaagaagaaaatgataaagctgtctttttaggagaagaatcaaaagaggatgaagaagaaaatgagcaagctgttaatttagaagaaaaaaatgcggaagaggataagaaagttgttaatttagaagagaaagaattagaagttaaaaaagagactgaagaagatgaagataaagaagaaatagagaaacaaaaacaagaagtggaaaaagcacaagaaagaaaacaacgacaagaagaaaagaaacgaaaaaaacaagaacagcaagaagaaaagaaacgaaaacgacaagaacaaagaaaagaaaggagagctaaaaacaaaattaaaaaacttgcggataaaatagatgagataagttggaatattgatggtatagaaagtcaaacaagtgtaaaaccgaaagcagttatagataaaattacggggcctgtatatgattattttaccgatgacaacaaaaaagctatatataaaacatggggagatttagaagatgaagaaggcgaaggattgggaaaattattgaaagaattgagtgatactagagatgagttaagaaccaaattaaataaagataataaaaaatattatgcccatgaaaatgagcctcctctaaaagaaaatgtagatgtcagcgaaattaaagaagatttagaaaaagtaaaatcaggattagaaaaggttaaagaatatcttaaagacaattctaaatttgaagaaattaaaggatacatcagttacagtcagtaa

SEQ ID NO: 690 - DNA, 979 bp, Borrelia burgdorferi
ttgcaagattgatgcaactggtaaagatgcaactggtaaagatgcaactggtaaagatgcaactggtaaagatgcaactggtaaaaatgcagaacaaaatataaaagggaaagttcaaggatttttagaaaagattttagatccagtaaaggataaaattgcttcaaatggtccaatagcagatgaattggcaaaaaaattacaagaagaagaaaaggtaaataacggggaagaagaaaatgataaagctgtctttttaggagaagaatcaaaagaggatgaagaagaaaatgagcaagctgttaatttagaagaaaaaaatgcggaagaggataagaaagttgttaatttagaagagaaagaattagaagttaaaaaagagactgaagaagatgaagataaagaagaaatagagaaacaaaaacaagaagtggaaaaagcacaagaaagaaaacaacgacaagaagaaaagaaacgaaaaaaacaagaacagcaagaagaaaagaaacgaaaacgacaagaacaaagaaaagaaaggagagctaaaaacaaaattaaaaaacttgcggataaaatagatgagataagttggaatattgatggtatagaaagtcaaacaagtgtaaaaccgaaagcagttatagataaaattacggggcctgtatatgattattttaccgatgacaacaaaaaagctatatataaaacatggggagatttagaagatgaagaaggcgaaggattgggaaaattattgaaagaattgagtgatactagagatgagttaagaaccaaattaaataaagataataaaaaatattatgcccatgaaaatgagcctcctctaaaagaaaatgtagatgtcagcgaaattaaagaagatttagaaaaagtaaaatcaggattagaaaaggttaaagaatatcttaaagacaattctaaatttgaagaaattaaaggatacatcagttacagtcag

SEQ ID NO: 691 - protein, 359 aa, Borrelia burgdorferi
LFGVVVNLRLMEWIMNKKMKIFIICAVFVLISSCKIDATGKDATGKDATGKDATGKDATGKNAEQNIKGKVQGFLEKILDPVKDKIASNGPIADELAKKLQEEEKVNNGEEENDKAVFLGEESKEDEEENEQAVNLEEKNAEEDKKVVNLEEKELEVKKETEEDEDKEEIEKQKQEVEKAQERKQRQEEKKRKKQEQQEEKKRKRQEQRKERRAKNKIKKLADKIDEISWNIDGIESQTSVKPKAVIDKITGPVYDYFTDDNKKAIYKTWGDLEDEEGEGLGKLLKELSDTRDELRTKLNKDNKKYYAHENEPPLKENVDVSEIKEDLEKVKSGLEKVKEYLKDNSKFEEIKGYISYSQ

SEQ ID NO: 692 - protein, 326 aa, Borrelia burgdorferi
CKIDATGKDATGKDATGKDATGKDATGKNAEQNIKGKVQGFLEKILDPVKDKIASNGPIADELAKKLQEEEKVNNGEEENDKAVFLGEESKEDEEENEQAVNLEEKNAEEDKKVVNLEEKELEVKKETEEDEDKEEIEKQKQEVEKAQERKQRQEEKKRKKQEQQEEKKRKRQEQRKERRAKNKIKKLADKIDEISWNIDGIESQTSVKPKAVIDKITGPVYDYFTDDNKKAIYKTWGDLEDEEGEGLGKLLKELSDTRDELRTKLNKDNKKYYAHENEPPLKENVDVSEIKEDLEKVKSGLEKVKEYLKDNSKFEEIKGYISYSQ

SEQ ID NO: 693 - DNA, 381 bp, Borrelia burgdorferi
taggcaaaatttaaatttataaaaacttgtaaggatgcttgtatgaaaatattgataaaaaagttaaaagttgtattatttctcaatttaattttacttatttcttgtgttaatgaaagtaatagaaacaaattggtttttaagctaaatattggaagtgagcctgctactttagatgctcaattaataaacgatacggttggatcagggattgtaagccaaatgtttcttggcattttagatggagatcccaggactggaggatacagaccgggacttgctaaaagttgggatatttctgatgacggagtagtttatacgtttcatttaagagataatcttgtttggagtgatggagtttccattactgccgaagaataa

SEQ ID NO: 694 - DNA, 274 bp, Borrelia burgdorferi
ttgtgttaatgaaagtaatagaaacaaattggtttttaagctaaatattggaagtgagcctgctactttagatgctcaattaataaacgatacggttggatcagggattgtaagccaaatgtttcttggcattttagatggagatcccaggactggaggatacagaccgggacttgctaaaagttgggatatttctgatgacggagtagtttatacgtttcatttaagagataatcttgtttggagtgatggagtttccattactgccgaagaa

SEQ ID NO: 695 - protein, 125 aa, Borrelia burgdorferi
AKFKFIKTCKDACMKILIKKLKVVLFLNLILLISCVNESNRNKLVFKLNIGSEPATLDAQLINDTVGSGIVSQMFLGILDGDPRTGGYRPGLAKSWDISDDGVVYTFHLRDNLVWSDGVSITAEE

SEQ ID NO: 696 - protein, 91 aa, Borrelia burgdorferi
CVNESNRNKLVFKLNIGSEPATLDAQLINDTVGSGIVSQMFLGILDGDPRTGGYRPGLAKSWDISDDGVVYTFHLRDNLVWSDGVSITAEE

SEQ ID NO: 697 - DNA, 1158 bp, Borrelia burgdorferi
taaagaaaagcttgcataaaaagtataacaaattctttaataattaaaatcaaaaagaatataattattgcactaaaattaaatttatacagttatatagaatcacttaaggaacaaaaaatgaaataccttaaaaacatttccttatttttgttaattttaggttgcaaatccatcccaaatggtaatttcaatctacacgatacaaaccataaattaggaaaactaaaatttcaagaagactcgataataagcagaaattatgataataaaatatccattgtgggagtatacaaccctttaacagaaaaagaaaattttaaagtcaatattttcatcaaaaaaaaaggattacaaatagatcctgaaaatattttgataaatgaagaaaaaattaattattcaaaatataaagcagaactcaaagtaaaatctagctttaataaaagcattatcagtatttcactaactaattcaagagatctattaacctacatttacgataaaagcacagggaaatacattaacattgactttaaggacaattggaacgtatcgcacagtataaaatttaataaggagtatattttagcatatataacagattttgataaagaaattaaaatatctaaaaatattttgcaaaaacgtattgataatagaaaaattgaaattgaaaaaacagagcttaaaacagaatataatgaaatagaggattattacatctacagtatgaaaattccaaaattatttgaaaaatcagacgctccctctgaaacttacgaaacatttgttatagcaaattattacccctgtgaaaatttaaatatactgtttttgaatttaagcttatactctgataaattacgctttctaaactctatttatgatgagaatgatagaaaattaaaaatggagcctcctgtgagagccttaaagaattcaaaaacaataaaagaaacattaaatatagtattaagtcctcaaaaaataatagagctagcaaaaaacattgaaaaagatattactctaaaattaaaatcttacggagaaaagggagaattcacatttgaaatatataaaccacttcttttaaaattcttaaaagaagtagatcattgcataaaaaatttgcaatcaagtaggcataaattttaa

SEQ ID NO: 698 - DNA, 991 bp, Borrelia burgdorferi
ttgcaaatccatcccaaatggtaatttcaatctacacgatacaaaccataaattaggaaaactaaaatttcaagaagactcgataataagcagaaattatgataataaaatatccattgtgggagtatacaaccctttaacagaaaaagaaaattttaaagtcaatattttcatcaaaaaaaaaggattacaaatagatcctgaaaatattttgataaatgaagaaaaaattaattattcaaaatataaagcagaactcaaagtaaaatctagctttaataaaagcattatcagtatttcactaactaattcaagagatctattaacctacatttacgataaaagcacagggaaatacattaacattgactttaaggacaattggaacgtatcgcacagtataaaatttaataaggagtatattttagcatatataacagattttgataaagaaattaaaatatctaaaaatattttgcaaaaacgtattgataatagaaaaattgaaattgaaaaaacagagcttaaaacagaatataatgaaatagaggattattacatctacagtatgaaaattccaaaattatttgaaaaatcagacgctccctctgaaacttacgaaacatttgttatagcaaattattacccctgtgaaaatttaaatatactgtttttgaatttaagcttatactctgataaattacgctttctaaactctatttatgatgagaatgatagaaaattaaaaatggagcctcctgtgagagccttaaagaattcaaaaacaataaaagaaacattaaatatagtattaagtcctcaaaaaataatagagctagcaaaaaacattgaaaaagatattactctaaaattaaaatcttacggagaaaagggagaattcacatttgaaatatataaaccacttcttttaaaattcttaaaagaagtagatcattgcataaaaaatttgcaatcaagtaggcataaattt

SEQ ID NO: 699 - protein, 384 aa, Borrelia burgdorferi
RKACIKSITNSLIIKIKKNIIIALKLNLYSYIESLKEQKMKYLKNISLFLLILGCKSIPNGNFNLHDTNHKLGKLKFQEDSIISRNYDNKISIVGVYNPLTEKENFKVNIFIKKKGLQIDPENILINEEKINYSKYKAELKVKSSFNKSIISISLTNSRDLLTYIYDKSTGKYINIDFKDNWNVSHSIKFNKEYILAYITDFDKEIKISKNILQKRIDNRKIEIEKTELKTEYNEIEDYYIYSMKIPKLFEKSDAPSETYETFVIANYYPCENLNILFLNLSLYSDKLRFLNSIYDENDRKLKMEPPVRALKNSKTIKETLNIVLSPQKIIELAKNIEKDITLKLKSYGEKGEFTFEIYKPLLLKFLKEVDHCIKNLQSSRHKF

SEQ ID NO: 700 - protein, 330 aa, Borrelia burgdorferi
CKSIPNGNFNLHDTNHKLGKLKFQEDSIISRNYDNKISIVGVYNPLTEKENFKVNIFIKKKGLQIDPENILINEEKINYSKYKAELKVKSSFNKSIISISLTNSRDLLTYIYDKSTGKYINIDFKDNWNVSHSIKFNKEYILAYITDFDKEIKISKNILQKRIDNRKIEIEKTELKTEYNEIEDYYIYSMKIPKLFEKSDAPSETYETFVIANYYPCENLNILFLNLSLYSDKLRFLNSIYDENDRKLKMEPPVRALKNSKTIKETLNIVLSPQKIIELAKNIEKDITLKLKSYGEKGEFTFEIYKPLLLKFLKEVDHCIKNLQSSRHKF

SEQ ID NO: 701 - DNA, 555 bp, Borrelia burgdorferi
taaatgaagaagtttttaatatccgtttattttttattgttttatggttgttcaactatatctttggtaaaaataccagaaaaagataaaataaatttaactgttttatcatctttaatgaattatcctgatttgaagatttcaaattttaaaataaaagactacgaacatttgcattattcatctgattttgaaagcttgagtgatactaaaaatagtgcttatatttacgttgatgaatctagtttcaataataatattaattttattaaagatctttttatttataataagaaattatatagaatacttattgcttatagcttgacccaaggtgcatcttttaaggcagaagttttatcttatcttgaaaaacaaaaaattatgaaaaatttttcattgaaaataaattttccaactgctaaaaaatttatggataataagtattggattgtaattgcaaaaaaccatttagattctcttgttaagagtaaaaattatttagtcttggcgaatgtaaagatggaatatatactcaaaaagtttttaacttga

SEQ ID NO: 702 - DNA, 451 bp, Borrelia burgdorferi
ttgttcaactatatctttggtaaaaataccagaaaaagataaaataaatttaactgttttatcatctttaatgaattatcctgatttgaagatttcaaattttaaaataaaagactacgaacatttgcattattcatctgattttgaaagcttgagtgatactaaaaatagtgcttatatttacgttgatgaatctagtttcaataataatattaattttattaaagatctttttatttataataagaaattatatagaatacttattgcttatagcttgacccaaggtgcatcttttaaggcagaagttttatcttatcttgaaaaacaaaaaattatgaaaaatttttcattgaaaataaattttccaactgctaaaaaatttatggataataagtattggattgtaattgcaaaaaaccatttagattctcttgttaagagtaaaaat

SEQ ID NO: 703 - protein, 183 aa, Borrelia burgdorferi
MKKFLISVYFLLFYGCSTISLVKIPEKDKINLTVLSSLMNYPDLKISNFKIKDYEHLHYSSDFESLSDTKNSAYIYVDESSFNNNINFIKDLFIYNKKLYRILIAYSLTQGASFKAEVLSYLEKQKIMKNFSLKINFPTAKKFMDNKYWIVIAKNHLDSLVKSKNYLVLANVKMEYILKKFLT

SEQ ID NO: 704 - protein, 150 aa, Borrelia burgdorferi
CSTISLVKIPEKDKINLTVLSSLMNYPDLKISNFKIKDYEHLHYSSDFESLSDTKNSAYIYVDESSFNNNINFIKDLFIYNKKLYRILIAYSLTQGASFKAEVLSYLEKQKIMKNFSLKINFPTAKKFMDNKYWIVIAKNHLDSLVKSKN

SEQ ID NO: 705 - DNA, 450 bp, Borrelia burgdorferi
tagagacgaagtcacaagcaaaatgttaaaagatttacaaaatcaagttcaagggggcaaataatgaaaaatttaaagacaaaaattaattttttagggatattttggctactgttactatttctttcttgcgaatcaataccatcacttccccaaaaaccaaccctaacaaacaaagaagatattgaaaatttaatgctcgatgaagcagaactttttagatactcaaccgcactaaatgtttggcttttgactgtaaaatcttatgtgatcaaatactatcctaatgacaaatttcctgtgtttgaaaattttgatcccgtgtttggcgatgaaaatggaactaaagaaacaaatatactaaaaaatcgaattacctactacaatcgatacatagaaaaaaccgaaccgattgtatttgggtgttacaaaaaatacagcagaagataa

SEQ ID NO: 706 - DNA, 319 bp, Borrelia burgdorferi
ttgcgaatcaataccatcacttccccaaaaaccaaccctaacaaacaaagaagatattgaaaatttaatgctcgatgaagcagaactttttagatactcaaccgcactaaatgtttggcttttgactgtaaaatcttatgtgatcaaatactatcctaatgacaaatttcctgtgtttgaaaattttgatcccgtgtttggcgatgaaaatggaactaaagaaacaaatatactaaaaaatcgaattacctactacaatcgatacatagaaaaaaccgaaccgattgtatttgggtgttacaaaaaatacagcagaaga

SEQ ID NO: 707 - protein, 148 aa, Borrelia burgdorferi
RRSHKQNVKRFTKSSSRGQIMKNLKTKINFLGIFWLLLLFLSCESIPSLPQKPTLTNKEDIENLMLDEAELFRYSTALNVWLLTVKSYVIKYYPNDKFPVFENFDPVFGDENGTKETNILKNRITYYNRYIEKTEPIVFGCYKKYSRR

SEQ ID NO: 708 - protein, 106 aa, Borrelia burgdorferi
CESIPSLPQKPTLTNKEDIENLMLDEAELFRYSTALNVWLLTVKSYVIKYYPNDKFPVFENFDPVFGDENGTKETNILKNRITYYNRYIEKTEPIVFGCYKKYSRR

SEQ ID NO: 709 - DNA, 453 bp, Borrelia burgdorferi
tgaatattaataataaaaaaaggagtaacaatgaaaattatcaacatattattttgtttgtttttactaatgctaaacggctgtaattctaatgatacaaataccaagcagacaaaaagcagacaaaagcgtgatttaacccaaaaagaagcaacacaagaaaaacctaaatctaaatctaaagaagacctgcttagagaaaagctatctgatgatcaaaaaacacaacttgactggttaaaaaccgctttaactggtgttggaaaatttgataaattcttagaaaatgatgaaggcaaaattaaatcagcacttgaacatataaagactgaacttgataaatgtaatggaaatgatgaaggaaaaaacaccttcaaaactaccgttcaagggttttttagcggcggcaatatagataattttgcagatcaagcaactgctacctgcaattaa

SEQ ID NO: 710 - DNA, 370 bp, Borrelia burgdorferi
ctgtaattctaatgatacaaataccaagcagacaaaaagcagacaaaagcgtgatttaacccaaaaagaagcaacacaagaaaaacctaaatctaaatctaaagaagacctgcttagagaaaagctatctgatgatcaaaaaacacaacttgactggttaaaaaccgctttaactggtgttggaaaatttgataaattcttagaaaatgatgaaggcaaaattaaatcagcacttgaacatataaagactgaacttgataaatgtaatggaaatgatgaaggaaaaaacaccttcaaaactaccgttcaagggttttttagcggcggcaatatagataattttgcagatcaagcaactgctacctgcaat

SEQ ID NO: 711 - protein, 149 aa, Borrelia burgdorferi
ILIIKKGVTMKIINILFCLFLLMLNGCNSNDTNTKQTKSRQKRDLTQKEATQEKPKSKSKEDLLREKLSDDQKTQLDWLKTALTGVGKFDKFLENDEGKIKSALEHIKTELDKCNGNDEGKNTFKTTVQGFFSGGNIDNFADQATATCN

SEQ ID NO: 712 - protein, 123 aa, Borrelia burgdorferi
CNSNDTNTKQTKSRQKRDLTQKEATQEKPKSKSKEDLLREKLSDDQKTQLDWLKTALTGVGKFDKFLENDEGKIKSALEHIKTELDKCNGNDEGKNTFKTTVQGFFSGGNIDNFADQATATCN

SEQ ID NO: 713 - DNA, 768 bp, Borrelia burgdorferi
taagtaaggagaatatttatgaaatataatacgattataagcatatttgtttgtttgtttttaactgcttgcaatccagattttaacacaaataagaaaagaactctaagtaaggggataatttcaaatcaagatgcagattctgataaaataataaaaaataaattacttgatgatttaataaatttaatagaaaaagcgaatgcagatagagaaaaatatgtaaaaaaaatggaagaagaaccttcggatcaatatggaatgttggctgtttttggaggtatgtattgggcagaatcaccacgggaattaatatctgatacaggtagtgagagatctattaggtatagaaggcgtgtttatagtattttattaaatgctattgaaactaatgaattaaagaaattttcagaaattagaatactgtcaataaaagtactagaaatatttagcctatttaatctatttggaagtactcttgatgatgtggttgttcacttatattccaaaaaagatactctaggtaaactagatatttcaaatttaaaaagacttaaaaatttgtttgaaaaattattatctataaaaacaatcgtttcaaagatgtcaaaacgtcttttattggattatcaaaataatgaaaattttataaaaacagataacgccaagcttggatcttatgtggttgcactttccaatcaaattcaagaaaaatataatgaagcagaaaggctgaaaagcgagataattttaatatataccctttaa

SEQ ID NO: 714 - DNA, 670 bp, Borrelia burgdorferi
ttgcaatccagattttaacacaaataagaaaagaactctaagtaaggggataatttcaaatcaagatgcagattctgataaaataataaaaaataaattacttgatgatttaataaatttaatagaaaaagcgaatgcagatagagaaaaatatgtaaaaaaaatggaagaagaaccttcggatcaatatggaatgttggctgtttttggaggtatgtattgggcagaatcaccacgggaattaatatctgatacaggtagtgagagatctattaggtatagaaggcgtgtttatagtattttattaaatgctattgaaactaatgaattaaagaaattttcagaaattagaatactgtcaataaaagtactagaaatatttagcctatttaatctatttggaagtactcttgatgatgtggttgttcacttatattccaaaaaagatactctaggtaaactagatatttcaaatttaaaaagacttaaaaatttgtttgaaaaattattatctataaaaacaatcgtttcaaagatgtcaaaacgtcttttattggattatcaaaataatgaaaattttataaaaacagataacgccaagcttggatcttatgtggttgcactttccaatcaaattcaagaaaaatataatgaagcagaaaggctgaaa

SEQ ID NO: 715 - protein, 254 aa, Borrelia burgdorferi
VRRIFMKYNTIISIFVCLFLTACNPDFNTNKKRTLSKGIISNQDADSDKIIKNKLLDDLINLIEKANADREKYVKKMEEEPSDQYGMLAVFGGMYWAESPRELISDTGSERSIRYRRRVYSILLNAIETNELKKFSEIRILSIKVLEIFSLFNLFGSTLDDVVVHLYSKKDTLGKLDISNLKRLKNLFEKLLSIKTIVSKMSKRLLLDYQNNENFIKTDNAKLGSYVVALSNQIQEKYNEAERLKSEIILIYTL

SEQ ID NO: 716 - protein, 223 aa, Borrelia burgdorferi
CNPDFNTNKKRTLSKGIISNQDADSDKIIKNKLLDDLINLIEKANADREKYVKKMEEEPSDQYGMLAVFGGMYWAESPRELISDTGSERSIRYRRRVYSILLNAIETNELKKFSEIRILSIKVLEIFSLFNLFGSTLDDVVVHLYSKKDTLGKLDISNLKRLKNLFEKLLSIKTIVSKMSKRLLLDYQNNENFIKTDNAKLGSYVVALSNQIQEKYNEAERLK

SEQ ID NO: 717 - DNA, 951 bp, Borrelia burgdorferi
taatatatattcttgattaagggaaaggagagtatttttatgaaaaaaaaaatgtttttatatacattgttaacgataggattgatgtcttgtaatctaaattctaaattatctggtaataaagaggaacaaaaaaataacaatgatataaaagaagctttaaatggcgttcaagaaaatgctattaataatttatatggaaataaaaaagaaaaaaaagattttattaaaaattcggaaaaattgaaagacaagggtttagacgtgaccaccctccccttagaacctgtagtggcgccctccgtagaatctgcggtgtctttaggagaatctaataataggattggtataccaaccatttcaattgagcataatcaaaaaaaagagataaaagaagaggattttttcccttctactgaggaagaaaagcaagcggataaagcaattaaagatatagagaatcttattggagaatctggatttcccgagttaattgagaatgtgtgctcacttaaacatgaatatactttaataagaagtgatttttatgatgtgataactaagattcagaataaaaaaatatcactaatgaaaaattctcataataatagaaataaaataagggaactagtacaattgcaaaataatttaaagataggagacgaacttgataaaattatgggttgcattgatactgcagaacaagagataagatctgccgctttcttttttgatgaagctaaggaaagcttaaaagaaggtattattaaaagattggaaaaaagtaaaaatagggcagcatcacaattatctaaaaaggctttaaatagagcagaggatgctttaaggtgcttagaaaattattcttctaaaaaaggtgaggcaataggaagaagaagctttataaaagaagttgttgaacaggcaaaaaatgctttaagtaagtcttaa

SEQ ID NO: 718 - DNA, 859 bp, Borrelia burgdorferi
ttgtaatctaaattctaaattatctggtaataaagaggaacaaaaaaataacaatgatataaaagaagctttaaatggcgttcaagaaaatgctattaataatttatatggaaataaaaaagaaaaaaaagattttattaaaaattcggaaaaattgaaagacaagggtttagacgtgaccaccctccccttagaacctgtagtggcgccctccgtagaatctgcggtgtctttaggagaatctaataataggattggtataccaaccatttcaattgagcataatcaaaaaaaagagataaaagaagaggattttttcccttctactgaggaagaaaagcaagcggataaagcaattaaagatatagagaatcttattggagaatctggatttcccgagttaattgagaatgtgtgctcacttaaacatgaatatactttaataagaagtgatttttatgatgtgataactaagattcagaataaaaaaatatcactaatgaaaaattctcataataatagaaataaaataagggaactagtacaattgcaaaataatttaaagataggagacgaacttgataaaattatgggttgcattgatactgcagaacaagagataagatctgccgctttcttttttgatgaagctaaggaaagcttaaaagaaggtattattaaaagattggaaaaaagtaaaaatagggcagcatcacaattatctaaaaaggctttaaatagagcagaggatgctttaaggtgcttagaaaattattcttctaaaaaaggtgaggcaataggaagaagaagctttataaaagaagttgttgaacaggcaaaaaatgctttaagtaagtct

SEQ ID NO: 719 - protein, 315 aa, Borrelia burgdorferi
YIFLIKGKESIFMKKKMFLYTLLTIGLMSCNLNSKLSGNKEEQKNNNDIKEALNGVQENAINNLYGNKKEKKDFIKNSEKLKDKGLDVTTLPLEPVVAPSVESAVSLGESNNRIGIPTISIEHNQKKEIKEEDFFPSTEEEKQADKAIKDIENLIGESGFPELIENVCSLKHEYTLIRSDFYDVITKIQNKKISLMKNSHNNRNKIRELVQLQNNLKIGDELDKIMGCIDTAEQEIRSAAFFFDEAKESLKEGIIKRLEKSKNRAASQLSKKALNRAEDALRCLENYSSKKGEAIGRRSFIKEVVEQAKNALSKS

SEQ ID NO: 720 - protein, 286 aa, Borrelia burgdorferi
CNLNSKLSGNKEEQKNNNDIKEALNGVQENAINNLYGNKKEKKDFIKNSEKLKDKGLDVTTLPLEPVVAPSVESAVSLGESNNRIGIPTISIEHNQKKEIKEEDFFPSTEEEKQADKAIKDIENLIGESGFPELIENVCSLKHEYTLIRSDFYDVITKIQNKKISLMKNSHNNRNKIRELVQLQNNLKIGDELDKIMGCIDTAEQEIRSAAFFFDEAKESLKEGIIKRLEKSKNRAASQLSKKALNRAEDALRCLENYSSKKGEAIGRRSFIKEVVEQAKNALSKS

SEQ ID NO: 721 - DNA, 918 bp, Borrelia burgdorferi
tgattaattttttttaaggattacgttttgaaaagaaacaaaatttggaaaacgttaaaactgtttcaaataactttactgttctcatgctctttttattctaaatcaaacaacacagaagcgataagtgaattacaatcaagccctattaaacttggaaaaattaaagttttacaaaaaacagaaaagattgtaagcacccaaaatcttcaaaacttacaacaaagccagttctttaaaaatgaaaaagaaaaaataattaaaaaaattgcacaagaatttgatgagaatgaaaaattgattaataaaataggtccaaatatcgaaatgtttgctcaaacaataaacacggatattcaaaaaatcgaacctaatgatcaatttggaataaataaaactttattcacagaaaaaaaagacaataatattgactttatgttaaaagacaatcgacttagaagattattttactcatctttaaattatgatgaaaataaaatcaaaaaattagccacaatactcgcgcaaacatcaagctcaaacgactaccattacacacttattggtttaattttttggacaggatttaaaatccaagaagcatttgaaagcgctgttaatattttaactaaagacgagcaaaagcgcctaatttttaattttagaacaaaaacagtaaaagagattcaggaaaattttgaaaaactaatgcaagagagaaattcatggataaaaatcgtcgataacattattggcgaatatgacaaaaatacgggaggatgcaaagctgatggaaaaattctcggagaagtaataagggttggatacgagcatgaactcgactcaaataaaagtatgcaaattttaaacaatattgaaacaccgctaaaaacctgttgtgaccacatacactactaa

SEQ ID NO: 722 - DNA, 828 bp, Borrelia burgdorferi
tgctctttttattctaaatcaaacaacacagaagcgataagtgaattacaatcaagccctattaaacttggaaaaattaaagttttacaaaaaacagaaaagattgtaagcacccaaaatcttcaaaacttacaacaaagccagttctttaaaaatgaaaaagaaaaaataattaaaaaaattgcacaagaatttgatgagaatgaaaaattgattaataaaataggtccaaatatcgaaatgtttgctcaaacaataaacacggatattcaaaaaatcgaacctaatgatcaatttggaataaataaaactttattcacagaaaaaaaagacaataatattgactttatgttaaaagacaatcgacttagaagattattttactcatctttaaattatgatgaaaataaaatcaaaaaattagccacaatactcgcgcaaacatcaagctcaaacgactaccattacacacttattggtttaattttttggacaggatttaaaatccaagaagcatttgaaagcgctgttaatattttaactaaagacgagcaaaagcgcctaatttttaattttagaacaaaaacagtaaaagagattcaggaaaattttgaaaaactaatgcaagagagaaattcatggataaaaatcgtcgataacattattggcgaatatgacaaaaatacgggaggatgcaaagctgatggaaaaattctcggagaagtaataagggttggatacgagcatgaactcgactcaaataaaagtatgcaaattttaaacaatattgaaacaccgctaaaaacctgttgtgaccacatacactac

SEQ ID NO: 723 - protein, 304 aa, Borrelia burgdorferi
LIFFKDYVLKRNKIWKTLKLFQITLLFSCSFYSKSNNTEAISELQSSPIKLGKIKVLQKTEKIVSTQNLQNLQQSQFFKNEKEKIIKKIAQEFDENEKLINKIGPNIEMFAQTINTDIQKIEPNDQFGINKTLFTEKKDNNIDFMLKDNRLRRLFYSSLNYDENKIKKLATILAQTSSSNDYHYTLIGLIFWTGFKIQEAFESAVNILTKDEQKRLIFNFRTKTVKEIQENFEKLMQERNSWIKIVDNIIGEYDKNTGGCKADGKILGEVIRVGYEHELDSNKSMQILNNIETPLKTCCDHIHY

SEQ ID NO: 724 - protein, 276 aa, Borrelia burgdorferi
CSFYSKSNNTEAISELQSSPIKLGKIKVLQKTEKIVSTQNLQNLQQSQFFKNEKEKIIKKIAQEFDENEKLINKIGPNIEMFAQTINTDIQKIEPNDQFGINKTLFTEKKDNNIDFMLKDNRLRRLFYSSLNYDENKIKKLATILAQTSSSNDYHYTLIGLIFWTGFKIQEAFESAVNILTKDEQKRLIFNFRTKTVKEIQENFEKLMQERNSWIKIVDNIIGEYDKNTGGCKADGKILGEVIRVGYEHELDSNKSMQILNNIETPLKTCCDHIHY

SEQ ID NO: 725 - DNA, 828 bp, Borrelia burgdorferi
taattaatactggttttaatttataaggagagtattttgaaaaaagccaaactaaatataatcaagattaatattattacaatgatattaactttaatttgcatctcatgtgcaccttttaacaaaatcaatcccaaggcaaatgaaaacaccaagcttaaaaaaaacaccagactgaaaaaacccgccaatccaggggaaaacatccaaaattttaaagataaatctggagaccttggcgcttctgatgaaaaatttatgggaactaccgcttcagagctaaaagcaattggtaaggagctagaagatcgaaaaaatcaatacgatatacaaatagccaaaattactaatgaagaatctaacctattagatacttatattcgggcttatgaactagctaacgaaaatgaaaaaatgcttttaaaaagatttcttctttcatctttagattataaaaaagaaaacatagagacattaaaagaaattcttgaaaaactcataaataattacgaaaacgaccccaaaattgctgcaaatttcctttatcgcatagcgctggatattcaattaaaactggaaaagcacttaaaatcaataaatgaaaaactggacactctaagcaaagaaaattcaaaagaagatttagaggcgttgctagaacaagtaaaatctgccttacagctacaagaaaagtttaaaaaaaccctaaacaaaactcttgaagattaccgtaaaaatactaacaacattcaagaaaataaagtactagcagaacactttaataaatattacaaagactctgattctttacaatctgccttttattaa

SEQ ID NO: 726 - DNA, 717 bp, Borrelia burgdorferi
tgtgcaccttttaacaaaatcaatcccaaggcaaatgaaaacaccaagcttaaaaaaaacaccagactgaaaaaacccgccaatccaggggaaaacatccaaaattttaaagataaatctggagaccttggcgcttctgatgaaaaatttatgggaactaccgcttcagagctaaaagcaattggtaaggagctagaagatcgaaaaaatcaatacgatatacaaatagccaaaattactaatgaagaatctaacctattagatacttatattcgggcttatgaactagctaacgaaaatgaaaaaatgcttttaaaaagatttcttctttcatctttagattataaaaaagaaaacatagagacattaaaagaaattcttgaaaaactcataaataattacgaaaacgaccccaaaattgctgcaaatttcctttatcgcatagcgctggatattcaattaaaactggaaaagcacttaaaatcaataaatgaaaaactggacactctaagcaaagaaaattcaaaagaagatttagaggcgttgctagaacaagtaaaatctgccttacagctacaagaaaagtttaaaaaaaccctaaacaaaactcttgaagattaccgtaaaaatactaacaacattcaagaaaataaagtactagcagaacactttaataaatattacaaagactctgattctttacaatctgccttttat

SEQ ID NO: 727 - protein, 274 aa, Borrelia burgdorferi
LILVLIYKESILKKAKLNIIKINIITMILTLICISCAPFNKINPKANENTKLKKNTRLKKPANPGENIQNFKDKSGDLGASDEKFMGTTASELKAIGKELEDRKNQYDIQIAKITNEESNLLDTYIRAYELANENEKMLLKRFLLSSLDYKKENIETLKEILEKLINNYENDPKIAANFLYRIALDIQLKLEKHLKSINEKLDTLSKENSKEDLEALLEQVKSALQLQEKFKKTLNKTLEDYRKNTNNIQENKVLAEHFNKYYKDSDSLQSAFY

SEQ ID NO: 728 - protein, 239 aa, Borrelia burgdorferi
CAPFNKINPKANENTKLKKNTRLKKPANPGENIQNFKDKSGDLGASDEKFMGTTASELKAIGKELEDRKNQYDIQIAKITNEESNLLDTYIRAYELANENEKMLLKRFLLSSLDYKKENIETLKEILEKLINNYENDPKIAANFLYRIALDIQLKLEKHLKSINEKLDTLSKENSKEDLEALLEQVKSALQLQEKFKKTLNKTLEDYRKNTNNIQENKVLAEHFNKYYKDSDSLQSAFY

SEQ ID NO: 729 - DNA, 783 bp, Borrelia burgdorferi
tgatttaatgtaaattttaattaccgcctaaaaaaggctttaaatggtataaaggaagaagatctaatggtatttagaacatataaacatttggaactaataatgctgcccatgttaatgctgagttgcgctttttttaagaaaccacaatctgtacatcaagacagcaatactggcaaaccaataagcgatgaaaaattacatttaatatcaggcaaaatttcaaataaaaaattgccaatcataaatagtaatcatgacgtaacttggataaaaacaaaggcaatgacaatcttaggcgaagatggaaaagaaataccagaatttaaaaacaaatttggatattcttatataatatctcctgtaaaaatggatggaaaatatagttattacgcgtcattattaatactttttgaaacaactaaaaatggagatgatgaatatgaaattgaagatgttaaatttgtaacagctggttccaccctagaacttaaaaattctcttttagctgttgaaaattcacaagaagaaggatatgttactgcatacccatttggaatattgatgagtgacgagattaaaaatgcttttaaattaacatataaaaatggtcattggaattatatgcttgcagatttaactgtcaaaaataaacttactcaagaaactaaaatttataaaatttctcttaattcaaaattaattattgaatttttaaaagaagtgctaaaagaaaattctatattaaaagacatagctggagatttatttgaagatatataa

SEQ ID NO: 730 - DNA, 654 bp, Borrelia burgdorferi
tgcgctttttttaagaaaccacaatctgtacatcaagacagcaatactggcaaaccaataagcgatgaaaaattacatttaatatcaggcaaaatttcaaataaaaaattgccaatcataaatagtaatcatgacgtaacttggataaaaacaaaggcaatgacaatcttaggcgaagatggaaaagaaataccagaatttaaaaacaaatttggatattcttatataatatctcctgtaaaaatggatggaaaatatagttattacgcgtcattattaatactttttgaaacaactaaaaatggagatgatgaatatgaaattgaagatgttaaatttgtaacagctggttccaccctagaacttaaaaattctcttttagctgttgaaaattcacaagaagaaggatatgttactgcatacccatttggaatattgatgagtgacgagattaaaaatgcttttaaattaacatataaaaatggtcattggaattatatgcttgcagatttaactgtcaaaaataaacttactcaagaaactaaaatttataaaatttctcttaattcaaaattaattattgaatttttaaaagaagtgctaaaagaaaattctatattaaaagacatagctggagatttatttgaagatata

SEQ ID NO: 731 - protein, 259 aa, Borrelia burgdorferi
FNVNFNYRLKKALNGIKEEDLMVFRTYKHLELIMLPMLMLSCAFFKKPQSVHQDSNTGKPISDEKLHLISGKISNKKLPIINSNHDVTWIKTKAMTILGEDGKEIPEFKNKFGYSYIISPVKMDGKYSYYASLLILFETTKNGDDEYEIEDVKFVTAGSTLELKNSLLAVENSQEEGYVTAYPFGILMSDEIKNAFKLTYKNGHWNYMLADLTVKNKLTQETKIYKISLNSKLIIEFLKEVLKENSILKDIAGDLFEDI

SEQ ID NO: 732 - protein, 218 aa, Borrelia burgdorferi; identical to SEQ ID NO: 442

SEQ ID NO: 733 - DNA, 1212 bp, Borrelia burgdorferi
  misc_feature (877): n equals a,t,g, or c
taattaccaaagataagtaaacttgcaaataaaactacacgtattgaaagtagatttgaaatttccattatatttatatataatggcactaaatatctgaaaatgaaggagaagcgggtgggcaataaaattttttatatttcagtggttttaattttaatagttggttgcgactggggaactattaaagataaaagtacagaaatttccaagctattaagaacggacaaagataagactaaaaatcaagatagaatagaattgggtgaagataattttgtatctaaaaataatatgtctactactgatacgggcattactagtttaggaagtctaaacaacttggatttaattaatcgttcacagcgggtcagtgaaccacctataatctcaaatgagaaagccatagctactcaagcaaaagtagatttaatgaacaacattaatgttactataataaacccaaaaccagctcaaaatttgggaaattctttaaacaatactactactgaagatagtgtgaagtttttatcaattgaaaaccaagagtggcttattagtaaaaagattttgcccagtaagttggaaaatttagaaagctttctaaaaacacaacacgaaaaagaagcttttaagacggctaaaactatacaaagtctcattagtaattccaatatgggtaaagaaattattaagtttaaggaagaatattacaaactttataatttgtttgaaggcatacaacaaaaattccatagtcaaaggaattcatttataaaagatactaaatttggggaaaatagacaaaaaaatgcagttatatttaaatccttttcatctatagagaaagaaattagagatttgaattataagttgngtgaaatccaaagtaattttcaaattgcagatgttagctggaataatgcaaactctcttttaaaagaatctatagaaaaattaattcaggcaattgaaaaaaggtatgacaatgagagtagaaagcaaggtcaaattggtggacctgctaatagatgggataaaaatcaagctgacaattttgctaaggatgcaaagtataaggcagaacattcagcaaatgatttggaaaatgcagccaactattttagatatagttgttcaaatgaaaaagaagctaaaaagctattagaagaaattaaaaaaagatttgtacgaattggtattagcctataa

SEQ ID NO: 734 - DNA, 1041 bp, Borrelia burgdorferi
  misc_feature (709): n equals a,t,g, or c
tgcgactggggaactattaaagataaaagtacagaaatttccaagctattaagaacggacaaagataagactaaaaatcaagatagaatagaattgggtgaagataattttgtatctaaaaataatatgtctactactgatacgggcattactagtttaggaagtctaaacaacttggatttaattaatcgttcacagcgggtcagtgaaccacctataatctcaaatgagaaagccatagctactcaagcaaaagtagatttaatgaacaacattaatgttactataataaacccaaaaccagctcaaaatttgggaaattctttaaacaatactactactgaagatagtgtgaagtttttatcaattgaaaaccaagagtggcttattagtaaaaagattttgcccagtaagttggaaaatttagaaagctttctaaaaacacaacacgaaaaagaagcttttaagacggctaaaactatacaaagtctcattagtaattccaatatgggtaaagaaattattaagtttaaggaagaatattacaaactttataatttgtttgaaggcatacaacaaaaattccatagtcaaaggaattcatttataaaagatactaaatttggggaaaatagacaaaaaaatgcagttatatttaaatccttttcatctatagagaaagaaattagagatttgaattataagttgngtgaaatccaaagtaattttcaaattgcagatgttagctggaataatgcaaactctcttttaaaagaatctatagaaaaattaattcaggcaattgaaaaaaggtatgacaatgagagtagaaagcaaggtcaaattggtggacctgctaatagatgggataaaaatcaagctgacaattttgctaaggatgcaaagtataaggcagaacattcagcaaatgatttggaaaatgcagccaactattttagatatagttgttcaaatgaaaaagaagctaaaaagctattagaagaaattaaaaaaagatttgtacgaattggtattagccta

SEQ ID NO: 735 - protein, 402 aa, Borrelia burgdorferi
  SITE (292): Xaa equals any of the naturally occurring L-amino acids
LPKISKLANKTTRIESRFEISIIFIYNGTKYLKMKEKRVGNKIFYISVVLILIVGCDWGTIKDKSTEISKLLRTDKDKTKNQDRIELGEDNFVSKNNMSTTDTGITSLGSLNNLDLINRSQRVSEPPIISNEKAIATQAKVDLMNNINVTIINPKPAQNLGNSLNNTTTEDSVKFLSIENQEWLISKKILPSKLENLESFLKTQHEKEAFKTAKTIQSLISNSNMGKEIIKFKEEYYKLYNLFEGIQQKFHSQRNSFIKDTKFGENRQKNAVIFKSFSSIEKEIRDLNYKLXEIQSNFQIADVSWNNANSLLKESIEKLIQAIEKRYDNESRKQGQIGGPANRWDKNQADNFAKDAKYKAEHSANDLENAANYFRYSCSNEKEAKKLLEEIKKRFVRIGISL

SEQ ID NO: 736 - protein, 347 aa, Borrelia burgdorferi
  SITE (237): Xaa equals any of the naturally occurring L-amino acids
CDWGTIKDKSTEISKLLRTDKDKTKNQDRIELGEDNFVSKNNMSTTDTGITSLGSLNNLDLINRSQRVSEPPIISNEKAIATQAKVDLMNNINVTIINPKPAQNLGNSLNNTTTEDSVKFLSIENQEWLISKKILPSKLENLESFLKTQHEKEAFKTAKTIQSLISNSNMGKEIIKFKEEYYKLYNLFEGIQQKFHSQRNSFIKDTKFGENRQKNAVIFKSFSSIEKEIRDLNYKLXEIQSNFQIADVSWNNANSLLKESIEKLIQAIEKRYDNESRKQGQIGGPANRWDKNQADNFAKDAKYKAEHSANDLENAANYFRYSCSNEKEAKKLLEEIKKRFVRIGISL

SEQ ID NO: 737 - DNA, 447 bp, Borrelia burgdorferi
taaataaattgtaggataaaaatgaaacaaaaatacgaaaactattttaaaaaaagattaattttaaacctattaatatttttactactagcatgctcaagcgaatccatattttcacaattaggaaatctgcaaaaaataaaacatgaatacaatattttgggcagttcaagtccaagaggaatttctctagtaggagaaactctctacattgcagccatgcatttatttaaaaaagaaaacggcaagattgaaaaaattgatttgagcaattcttatgagtttataaacgacattgtaaatatatctggaaaaacctatcttttagcgcaaaacaaagaagaagaattagaagtttgcgagctaaatggaaaagattggacattaaaatttaaaaaaccgctaaaagcatataaattcttaaaatccgtagaagagatggcgtaa

SEQ ID NO: 738 - DNA, 351 bp, Borrelia burgdorferi
tgctcaagcgaatccatattttcacaattaggaaatctgcaaaaaataaaacatgaatacaatattttgggcagttcaagtccaagaggaatttctctagtaggagaaactctctacattgcagccatgcatttatttaaaaaagaaaacggcaagattgaaaaaattgatttgagcaattcttatgagtttataaacgacattgtaaatatatctggaaaaacctatcttttagcgcaaaacaaagaagaagaattagaagtttgcgagctaaatggaaaagattggacattaaaatttaaaaaaccgctaaaagcatataaattcttaaaatccgtagaagagatggcg

SEQ ID NO: 739 - protein, 147 aa, Borrelia burgdorferi
INCRIKMKQKYENYFKKRLILNLLIFLLLACSSESIFSQLGNLQKIKHEYNILGSSSPRGISLVGETLYIAAMHLFKKENGKIEKIDLSNSYEFINDIVNISGKTYLLAQNKEEELEVCELNGKDWTLKFKKPLKAYKFLKSVEEMA

SEQ ID NO: 740 - protein, 117 aa, Borrelia burgdorferi
CSSESIFSQLGNLQKIKHEYNILGSSSPRGISLVGETLYIAAMHLFKKENGKIEKIDLSNSYEFINDIVNISGKTYLLAQNKEEELEVCELNGKDWTLKFKKPLKAYKFLKSVEEMA

SEQ ID NO: 741 - DNA, 564 bp, Borrelia burgdorferi
  misc_feature (248): n equals a,t,g, or c
  misc_feature (249): n equals a,t,g, or c
  misc_feature (251): n equals a,t,g, or c
  misc_feature (260): n equals a,t,g, or c
taaggagcatatatgaggattttggttggcgtttgtataatagcattggctttattgggttgttatttgcctgataatcaggaacaagctgttcaaactttttttgagaattcggaaagtagtgatatgggttccgatgagattgttactgaaggcatattttctagtttaaaattatatgcgtctgaacatcgtttattggttgagataaaaaagactttaattagtttaaaagatcctaattatcnngntgtagtacncccagtgagtgactataatgaggagtattttaataaattctttctagatttagggtctgagcaatctaaagacctgattaagttgtttattatggtaaaaaatgagcagaacaataataaatttatgcgtatagttcgttggctgtattcatgtatagaggagttatattctctagatattaagtattctggcgaggggagccatgagtataatcgtaatatgcctagacccactgcttatgaacaatatttaaaagtgaagaggtatgattataatagcccagtttctattttacctacataa

SEQ ID NO: 742 - DNA, 477 bp, Borrelia burgdorferi
  misc_feature (188): n equals a,t,g, or c
  misc_feature (189): n equals a,t,g, or c
  misc_feature (191): n equals a,t,g, or c
  misc_feature (200): n equals a,t,g, or c
tgttatttgcctgataatcaggaacaagctgttcaaactttttttgagaattcggaaagtagtgatatgggttccgatgagattgttactgaaggcatattttctagtttaaaattatatgcgtctgaacatcgtttattggttgagataaaaaagactttaattagtttaaaagatcctaattatcnngntgtagtacncccagtgagtgactataatgaggagtattttaataaattctttctagatttagggtctgagcaatctaaagacctgattaagttgtttattatggtaaaaaatgagcagaacaataataaatttatgcgtatagttcgttggctgtattcatgtatagaggagttatattctctagatattaagtattctggcgaggggagccatgagtataatcgtaatatgcctagacccactgcttatgaacaatatttaaaagtgaagaggtatgattataat

SEQ ID NO: 743 - protein, 186 aa, Borrelia burgdorferi
  SITE (82): Xaa equals any of the naturally occurring L-amino acids
  SITE (83): Xaa equals any of the naturally occurring L-amino acids
  SITE (86): Xaa equals any of the naturally occurring L-amino acids
GAYMRILVGVCIIALALLGCYLPDNQEQAVQTFFENSESSDMGSDEIVTEGIFSSLKLYASEHRLLVEIKKTLISLKDPNYXXVVXPVSDYNEEYFNKFFLDLGSEQSKDLIKLFIMVKNEQNNNKFMRIVRWLYSCIEELYSLDIKYSGEGSHEYNRNMPRPTAYEQYLKVKRYDYNSPVSILPT

SEQ ID NO: 744 - protein, 159 aa, Borrelia burgdorferi
  SITE (63): Xaa equals any of the naturally occurring L-amino acids
  SITE (64): Xaa equals any of the naturally occurring L-amino acids
  SITE (67): Xaa equals any of the naturally occurring L-amino acids
CYLPDNQEQAVQTFFENSESSDMGSDEIVTEGIFSSLKLYASEHRLLVEIKKTLISLKDPNYXXVVXPVSDYNEEYFNKFFLDLGSEQSKDLIKLFIMVKNEQNNNKFMRIVRWLYSCIEELYSLDIKYSGEGSHEYNRNMPRPTAYEQYLKVKRYDYN

SEQ ID NO: 745 - DNA, 1011 bp, Borrelia burgdorferi
  misc_feature (557): n equals a,t,g, or c
  misc_feature (572): n equals a,t,g, or c
  misc_feature (573): n equals a,t,g, or c
  misc_feature (893): n equals a,t,g, or c
  misc_feature (897): n equals a,t,g, or c
  misc_feature (906): n equals a,t,g, or c
taaagtattttattttttttattatccactgttctttttgctcaagagactgatggattagcagagggttctaaaagggcagagcctggagaattagttttagattttgccgagcttgcaagagatccaagttcaactagacttgatcttacaaattatgttgattatgtatattcgggcgcttctggtattgttaagccggaagatatggttgtagatcttgggataaataattggagcgttttacttactccttctgcaaggttgcaggcttacgttaaaaattcagttgttgcgcccgctgttgttaagagtgagtcaaaaaggtacgcaggtgatactattttaggggtaagagttttgtttccaagctattctcaatcatctgctatgattatgccaccatttaaaattcctttttattcaggggaaagtggcaatcaatttttaggcaaaggtcttattgataacattaaaaccatgaaagaaattaaggtatctgtttatagtttagggtatgagatagatcttgaggttttatttgaagatatgaatgncatggaatatgcttnntctatgggtactttaaagtttaaagggtgggctgatttaatttggtcaaatcctaactatattcctaatatatcatccagaattattaaagacgatgttccaaattatcctcttgcttcaagtaaaatgagatttaaggcttttagagtttcaaagtcacacagttcaaaagagcaaaatttcatcttttatgttaaagatttaagagttctttatgataagttgagtgtttcaatagattctgatattgacagtgagtctgtatttaaagtttatgagactagcggaactgaatcccttcgtaaattaaaggcacacgnaacntttaaaagngttttaaagcttagagaaaaaatttctatgcctgaaggctctttccaaaactttgtagaaaagattgagagtgaaaaacctgaagaatcatctccgaaaaattag

SEQ ID NO: 746 - DNA, 945 bp, Borrelia burgdorferi
  misc_feature (494): n equals a,t,g, or c
  misc_feature (509): n equals a,t,g, or c
  misc_feature (510): n equals a,t,g, or c
  misc_feature (830): n equals a,t,g, or c
  misc_feature (834): n equals a,t,g, or c
  misc_feature (843): n equals a,t,g, or c
gagggttctaaaagggcagagcctggagaattagttttagattttgccgagcttgcaagagatccaagttcaactagacttgatcttacaaattatgttgattatgtatattcgggcgcttctggtattgttaagccggaagatatggttgtagatcttgggataaataattggagcgttttacttactccttctgcaaggttgcaggcttacgttaaaaattcagttgttgcgcccgctgttgttaagagtgagtcaaaaaggtacgcaggtgatactattttaggggtaagagttttgtttccaagctattctcaatcatctgctatgattatgccaccatttaaaattcctttttattcaggggaaagtggcaatcaatttttaggcaaaggtcttattgataacattaaaaccatgaaagaaattaaggtatctgtttatagtttagggtatgagatagatcttgaggttttatttgaagatatgaatgncatggaatatgcttnntctatgggtactttaaagtttaaagggtgggctgatttaatttggtcaaatcctaactatattcctaatatatcatccagaattattaaagacgatgttccaaattatcctcttgcttcaagtaaaatgagatttaaggcttttagagtttcaaagtcacacagttcaaaagagcaaaatttcatcttttatgttaaagatttaagagttctttatgataagttgagtgtttcaatagattctgatattgacagtgagtctgtatttaaagtttatgagactagcggaactgaatcccttcgtaaattaaaggcacacgnaacntttaaaagngttttaaagcttagagaaaaaatttctatgcctgaaggctctttccaaaactttgtagaaaagattgagagtgaaaaacctgaagaatcatctccgaaaaat

SEQ ID NO: 747 - protein, 335 aa, Borrelia burgdorferi
  SITE (185): Xaa equals any of the naturally occurring L-amino acids
  SITE (190): Xaa equals any of the naturally occurring L-amino acids
  SITE (297): Xaa equals any of the naturally occurring L-amino acids
  SITE (301): Xaa equals any of the naturally occurring L-amino acids
SILFFLLSTVLFAQETDGLAEGSKRAEPGELVLDFAELARDPSSTRLDLTNYVDYVYSGASGIVKPEDMVVDLGINNWSVLLTPSARLQAYVKNSVVAPAVVKSESKRYAGDTILGVRVLFPSYSQSSAMIMPPFKIPFYSGESGNQFLGKGLIDNIKTMKEIKVSVYSLGYEIDLEVLFEDMNXMEYAXSMGTLKFKGWADLIWSNPNYIPNISSRIIKDDVPNYPLASSKMRFKAFRVSKSHSSKEQNFIFYVKDLRVLYDKLSVSIDSDIDSESVFKVYETSGTESLRKLKAHXTFKXVLKLREKISMPEGSFQNFVEKIESEKPEESSPKN

SEQ ID NO: 748 - protein, 315 aa, Borrelia burgdorferi
  SITE (165): Xaa equals any of the naturally occurring L-amino acids
  SITE (170): Xaa equals any of the naturally occurring L-amino acids
  SITE (277): Xaa equals any of the naturally occurring L-amino acids
  SITE (281): Xaa equals any of the naturally occurring L-amino acids
EGSKRAEPGELVLDFAELARDPSSTRLDLTNYVDYVYSGASGIVKPEDMVVDLGINNWSVLLTPSARLQAYVKNSVVAPAVVKSESKRYAGDTILGVRVLFPSYSQSSAMIMPPFKIPFYSGESGNQFLGKGLIDNIKTMKEIKVSVYSLGYEIDLEVLFEDMNXMEYAXSMGTLKFKGWADLIWSNPNYIPNISSRIIKDDVPNYPLASSKMRFKAFRVSKSHSSKEQNFIFYVKDLRVLYDKLSVSIDSDIDSESVFKVYETSGTESLRKLKAHXTFKXVLKLREKISMPEGSFQNFVEKIESEKPEESSPKN

SEQ ID NO: 749 - DNA, 477 bp, Borrelia burgdorferi
tgaatattaataataaaaaaaggagtaacaatgaaaatcatcaacatattattttgtttatttttactaatgctaaacggctgtaattctaatgataatgacactttaaaaaacaatgcccaacaaacaaaaagacggggaaagcgtgatttaacccaaaaagaaacaacacaagaaaaaccaaaatctaaagaagaactacttagagaaaagctatctgacgatcaaaaaacacatcttgactggttaaaacccgctttaactggtgctggagaatttgacaaattcttagaaaatgatgatgataaaataaaatcagcacttgatcatataaaaactcaacttgatagttgtaatggtgatcaagcagaacaacaaaaaaccactttcaaaactgtggttacagaattctttaaaaatggtgatatagataattttgcaactggagcggttagtaactgcaataatggtggctaa

SEQ ID NO: 750 - DNA, 393 bp, Borrelia burgdorferi
tgtaattctaatgataatgacactttaaaaaacaatgcccaacaaacaaaaagacggggaaagcgtgatttaacccaaaaagaaacaacacaagaaaaaccaaaatctaaagaagaactacttagagaaaagctatctgacgatcaaaaaacacatcttgactggttaaaacccgctttaactggtgctggagaatttgacaaattcttagaaaatgatgatgataaaataaaatcagcacttgatcatataaaaactcaacttgatagttgtaatggtgatcaagcagaacaacaaaaaaccactttcaaaactgtggttacagaattctttaaaaatggtgatatagataattttgcaactggagcggttagtaactgcaataatggtggc

SEQ ID NO: 751 - protein, 157 aa, Borrelia burgdorferi
ILIIKKGVTMKIINILFCLFLLMLNGCNSNDNDTLKNNAQQTKRRGKRDLTQKETTQEKPKSKEELLREKLSDDQKTHLDWLKPALTGAGEFDKFLENDDDKIKSALDHIKTQLDSCNGDQAEQQKTTFKTVVTEFFKNGDIDNFATGAVSNCNNGG

SEQ ID NO: 752 - protein, 131 aa, Borrelia burgdorferi
CNSNDNDTLKNNAQQTKRRGKRDLTQKETTQEKPKSKEELLREKLSDDQKTHLDWLKPALTGAGEFDKFLENDDDKIKSALDHIKTQLDSCNGDQAEQQKTTFKTVVTEFFKNGDIDNFATGAVSNCNNGG

SEQ ID NO: 753 - DNA, 453 bp, Borrelia burgdorferi
tgaatattaataataaaaaaaggaataataatgaaaattatcaacatattattttgtttatttttactaatgctaaacggctgtaattctaatgatactaataatagccaaacaaaaagtagacaaaaacgtgatttaacccaaaaagaagcaacacaagaaaaacctaaatctaaagaagaacttcttagagaaaagctaaatgataatcaaaaaacacaccttgactggttaaaagaagctctgggcaatgatggagaatttaataaatttttaggatatgatgaaagcaaaataaaatctgcacttgatcatataaagagtgaacttgacagttgtactggagataaggttgaaaataaaaataccttcaagcaggtcgttcaggaggcccttaaagggggcatagacggctttgaaaatactgcaagtagtacgtgcaaaaattcataa

SEQ ID NO: 754 - DNA, 369 bp, Borrelia burgdorferi
tgtaattctaatgatactaataatagccaaacaaaaagtagacaaaaacgtgatttaacccaaaaagaagcaacacaagaaaaacctaaatctaaagaagaacttcttagagaaaagctaaatgataatcaaaaaacacaccttgactggttaaaagaagctctgggcaatgatggagaatttaataaatttttaggatatgatgaaagcaaaataaaatctgcacttgatcatataaagagtgaacttgacagttgtactggagataaggttgaaaataaaaataccttcaagcaggtcgttcaggaggcccttaaagggggcatagacggctttgaaaatactgcaagtagtacgtgcaaaaattca

SEQ ID NO: 755 - protein, 149 aa, Borrelia burgdorferi
ILIIKKGIIMKIINILFCLFLLMLNGCNSNDTNNSQTKSRQKRDLTQKEATQEKPKSKEELLREKLNDNQKTHLDWLKEALGNDGEFNKFLGYDESKIKSALDHIKSELDSCTGDKVENKNTFKQVVQEALKGGIDGFENTASSTCKNS

SEQ ID NO: 756 - protein, 123 aa, Borrelia burgdorferi
CNSNDTNNSQTKSRQKRDLTQKEATQEKPKSKEELLREKLNDNQKTHLDWLKEALGNDGEFNKFLGYDESKIKSALDHIKSELDSCTGDKVENKNTFKQVVQEALKGGIDGFENTASSTCKNS
